United States Patent Application Publication US 2010/0120627 A1 - sequence listing, part 13

SEQ ID NO: 30300 - protein, 765 aa, Homo sapiens
MAASQGGGGNSGGGGCGGGGSSGGCGTAGGGGGGAGGGGGGGGGTLVVPIPVPTLFGQPFPNGPPWNPGSLQPQHTVRSLDRALEEAGSSGILSLSGRKLRDFPGSGYDLTDTTQADLSRNRFTEIPSDVWLFAPLETLNLYHNCIKTIPEAIKNLQMLTYLNISRNLLSTLPKYLFDLPLKVLVVSNNKLVSIPEEIGKLKDLMELDISCNEIQVLPQQMGKLHSLRELNIRRNNLHVLPDELGDLPLVKLDFSCNKVTEIPVCYRKLHHLQVIILDNNPLQVPPAQICLKGKVHIFKYLNIQACCRMDKKPDSLDLPSLSKRMPSQPLTDSMEDFYPNKNHGPDSGIGSDNGEKRLSTTEPSDDDTVSLHSQVSESNREQTSRNDSHIIGSKTDSQKDQEVYDFVDPNTEDVAVPEQGNAHIGSFVSFFKGKEKCSEKSRKNEELGDEKRLEKEQLLAEEEDDDLKEVTDLRKIAAQLLQQEQKNRILNHSTSVMRNKPKQTVECEKSVSADEVNSPLSPLTWQPLENQKDQIDEQPWPESHPIIWQSEERRRSKQIRKEYFKYKSMRKSSSGNENDEQDSDNANMSTQSPVSSEEYDRTDGFSHSPFGLKPRSAFSRSSRQEYGAADPGFTMRRKMEHLREEREQIRQLRNNLESRLKVILPDDIGAALMDGVVLCHLANHIRPRSVASIHVPSPAVPKLSMAKCRRNVENFLDACKKLGVSQERLCLPHHILEERGLVKVGVTVQALLELPTTKASQLSVA

SEQ ID NO: 30301 - DNA, 2460 bp, Homo sapiens
atcttatggaggaggatgccgctacgaggagtaccagggcaactcgcccgatgcctgcagtgaaggccgctcgtccgaggccttgccagtcgtcttgccagacgcctacagcagggaccactcgcccaaagcctatagtgggggccgcagcagttccagtaacggttacagccggagtgaccgctacggagaagaaggctgctacgaggagtacagaggccgctcgcccgacgcccacagcgggggccgcaacagttccagcaacagttacggccagagccaccactatggaggagaaggccgctatgaggagtaccgaggccgctcacacgaggcccgcagcgggggccgctccactgatgcccacagcaggggccggtccgacgacgcctacagtgggggccatgacagttccagctggagcgactgctgcggaggaggaggccgttatgaggagtaccaaggccgctcgctggatgccaacagtggaggctgctcgcccgaggcctacagtgggggccacgacaattccagctggagcgaccgctacggagtaggaggccactatgaggagaaccgaggccactctctggatgccaacagcggaggccgttcacccgacacccacagtgggggccacagcagttccagcaacagttacggccagagccaccgctatggaggagaaggccgctatgagtaccgaggccgctcgcatgacgcccacagtgggggctgctctgccgacgcctacagtgggggccacgacagttccagccagagcaaccgctacggaggaggaggctgctacgaggagtaccgaggccgctccctcgatgccaacagtggaggccgctcgcccaatgcctacagcgggggccacgacagttccagctggagccaccgctacggaggaggaggccgctacgaggagtaccgaggccgctcccttgatgccaacagtggaggccgctcgcctgatgcctacagtgggggccacgacagttctggccagagcaactgctacggaggaggaggccgctacgaggagtaccgaggccgcttgctcgatgccaacagtggaggccgctcgcctgatgcctacagtgggggccacgacagttccagccagagcaaccgctatggaggaggcggccgctacgaggagtaccgaggccactcgcttgatgccaacagcggaggccgctcgcctgacacctacagccggggccacgacagttccagccagagcgaccactatggaggaggaggtcgctcactcgatgccaacagcagtggccgcttgcctgacgcctacagtgggggccatgacagttccagccggagccaccgctacggaggaggaggccgctacgaggagtaccgaggccgctcgctcgatgccaacagcggaggccgctcacccaatgcctacagcgggggccacaacagttccagccggaacgacccctgcagaggaggaggccgctacgaggagaaccgaggtcactctctcgatgccaacagcggaggccactcacccaacgcctacagtgggggccgtgacagttccagcaacagttacgaccggagccaccgctatggaggaggaggccactacgaagagtaccgaggccgctcgcacgacacccacagcaggggccgatcgcccgatgcccacagcggggaccactacaccgaagcctacagcaggggccgcgacagtttcagcaacagctatggccggagtgaccattacggaagaggaggctgctacgaggaataccaaggccgctcgcccaatgcctacggcgggggccgcggcctcaacagttccaacaacagtcatggccggagccaccgctacggaggaggaggccgctacgaggagtaccgaggcccctcgcctgacgcccacagtgggggccgcgacagttccatcaagagttacggcctgagcgaccgctacggaggaggaggccactacgaggagtaccagggcagcttgcctgacgcctacagcggcgaccacgacagatccagcaacagttacggccggagcgaccgctactcgaggggtcgagaccgggtaggcagaccggatcgtgggctccctctgcccatggaaacgggcagccctcccctgcatgattcttacagccggtcaggctgcagggtgcccaggggcggaggccgtcaaggaggccgcttcgagaggggggaaggccggagcagatactaagcaggaacagacttgggcccaaaaattccttttcaaagaaacaaaaagaagaacctgttctatgttaactacccaaggactagtataagtaggagttgtttttaccttttaagaatttcctgttaagatctccatttttatgcttttgtgaggaaaaacttaaaattagtttgaaattgttaatgtttctttcaacaagttcttgttaaaagtataag

SEQ ID NO: 30302 - protein, 463 aa, Homo sapiens
MRRTEATLWMPTAEAVHPTPTVGATAVPATVTARATAMEEKAAMSTEAARMTPTVGAALPTPTVGATTVPARATATEEEAATRSTEAAPSMPTVEAARPMPTAGATTVPAGATATEEEAATRSTEAAPLMPTVEAARLMPTVGATTVLARATATEEEAATRSTEAACSMPTVEAARLMPTVGATTVPARATAMEEAAATRSTEATRLMPTAEAARLTPTAGATTVPARATTMEEEVAHSMPTAVAACLTPTVGAMTVPAGATATEEEAATRSTEAARSMPTAEAAHPMPTAGATTVPAGTTPAEEEAATRRTEVTLSMPTAEATHPTPTVGAVTVPATVTTGATAMEEEATTKSTEAARTTPTAGADRPMPTAGTTTPKPTAGAATVSATAMAGVTITEEEAATRNTKAARPMPTAGAAASTVPTTVMAGATATEEEAATRSTEAPRLTPTVGAATVPSRVTA

SEQ ID NO: 30303 - DNA, 1615 bp, Homo sapiens
cctcggagtgtgtggcgccatgatgcagggaagatggcttcgtttcggaagctaacgctttctgaaaaagtgccgccaaatcatcccagtcggaaaaaggttaacttcctagatatgtctctagacgacattataatctataaagagttagaagggacaaatgctgaagaagaaaagaataaaagacagaaccatagtaaaaaggaatcgccttcaagacagcaatcaaaagctcatagacatcgccatcggagaggagaagtgcagtgacaattatgaggcccaagcagagaagaatcaaggccagtcagaggggaaccagcatcaatcagaaggaaatccggacaaatcagaagaatcccagggccaaccagaagaaaatcatcattctgagcgatcccgaaaccacttagagagatctctttctcagtcagacagatctcaagggcagctaaagagacatcatccccaatatgagagatctcatggccaatacaagagatctcatggtcaatctgagagatctcatggccactcagagagatctcatggtcactcagagagatctcatggtcactcagagagatctcatggtcactcaaagagatctcgtagccagggagatcttgtggacactcagagtgatctcatagccactcagagagatctcatagccactcagaaagatctcatagccactcagagagatctcatagccactcagagagatctcatagtcactcagagagatctcgtggccactgagagagatctcataaatcagtcagggagatctcatggccaatcagaaagacatcagagatactcaacaggtaaaaatacaataactacttaatcatcagaacaatgtgttgaattctgtggaaatagaaaagcatatatctatattctaatggctaaatatgtatttgttgaaacatgtatattgggacaaagacataaatattagaatggaggtaatacatacatagtatcaatattgtttcaacttgatgtcctctaagctatcatccagttacccaagatgtcccattaagttgttcccggtaggtctgctttccctggaagagccgtatgtactcagcctttcctattgggccttccccacaattagaatattttgacttagtgtcctgtcccccttggacgttccaacttgacttagtgtccagtgccccttggacattccaacctggtaggtaagctaatctaacaactaactgccaaattgataatatataatctatgataatgaatatctcttttgtgtctccttcctaagccatcctcagagagtccttagcagacaaatggtagatgtatctttgggcagctgaacttttctgctttcctcaaatcagaccatatgagaggatatattctatgcatagatgtaatgctaaccttctgaatatattttgaatacatttatatattcactgttgccttataaaactgttagggtaggtctgtctaccctagcaaaagaaacacagaaatttaaatgtactgggagttatgttgttaaaaacacaagatatgttaactgcagtttgtttggttattcaataaaagttttagttttaatttctca

SEQ ID NO: 30304 - protein, 231 aa, Homo sapiens
MLKKKRIKDRTIVKRNRLQDSNQKLIDIAIGEEKCSDNYEAQAEKNQGQSEGNQHQSEGNPDKSEESQGQPEENHHSERSRNHLERSLSQSDRSQGQLKRHHPQYERSHGQYKRSHGQSERSHGHSERSHGHSERSHGHSERSHGHSKRSRSQGDLVDTQSDLIATQRDLIATQKDLIATQRDLIATQRDLIVTQRDLVATERDLINQSGRSHGQSERHQRYSTGKNTITT

SEQ ID NO: 30305 - DNA, 1708 bp, Homo sapiens
agggaagatggcttcgtttcggaagctaacgctttctgaaaaagtgccgccaaatcatcccagtcggaaaaaggttaacttcctagatatgtctctagacgacattataatctataaagagttagaagggacaaatgctgaagaagaaaagaataaaagacagaaccatagtaaaaaggaatcgccttcaagacagcaatcaaaagctcatagacatcgccatcggagaggctactcaagatgcagaagcaactctgaggaaggaaatcatgataaaaaaccatcccaaaaaccttctggattcaagtctggacaacaccctttaaatgggcagcctttaattgagcaggagaagtgcagtgacaattatgaggcccaagcagagaagaatcaaggccagtcagaggggaaccagcatcaatcagaaggaaatccggacaaatcagaagaatcccagggccaaccagaagaaaatcatcattctgagcgatcccgaaaccacttagagagatctctttctcagtcagacagatctcaagggcagctaaagagacatcatccccaatatgagagatctcatggccaatacaagagatctcatggtcaatctgagagatctcatggccactcagagagatctcatggtcactcagagagatctcatggtcactcagagagatctcatggtcactcaaagagatctcgtagccagggagatcttgtggacactcagagtgatctcatagccactcagagagatctcatagccactcagaaagatctcatagccactcagagagatctcatagccactcagagagatctcatagtcactcagagagatctcgtggccactgagagagatctcataaatcagtcagggagatctcatggccaatcagaaagacatcagagatactcaacaggtaaaaatacaataactacttaatcatcagaacaatgtgttgaattctgtggaaatagaaaagcatatatctatattctaatggctaaatatgtatttgttgaaacatgtatattgggacaaagacataaatattagaatggaggtaatacatacatagtatcaatattgtttcaacttgatgtcctctaagctatcatccagttacccaagatgtcccattaagttgttcccggtaggtctgctttccctggaagagccgtatgtactcagcctttcctattgggccttccccacaattagaatattttgacttagtgtcctgtcccccttggacgttccaacttgacttagtgtccagtgccccttggacattccaacctggtaggtaagctaatctaacaactaactgccaaattgataatatataatctatgataatgaatatctcttttgtgtctccttcctaagccatcctcagagagtccttagcagacaaatggtagatgtatctttgggcagctgaacttttctgctttcctcaaatcagaccatatgagaggatatattctatgcatagatgtaatgctaaccttctgaatatattttgaatacatttatatattcactgttgccttataaaactgttagggtaggtctgtctaccctagcaaaagaaacacagaaatttaaatgtactgggagttatgttgttaaaaacacaagatatgttaactgcagtttgtttggttattcaataaaagttttagttttaatttctca

SEQ ID NO: 30306 - protein, 313 aa, Homo sapiens; identical to SEQ ID NO: 4227

SEQ ID NO: 30307 - DNA, 4535 bp, Homo sapiens
ggctcactctggcaggtaggaacaggggagagtgcacctgctaccagtcaagctcagccagactgcaagaggaggcgaggcggagccagccgagggagtgaaccatggacaagttgaaatgcccgagtttcttcaagtgcagggagaaggagaaagtgtcggcttcatcagagaatttccatgttggtgaaaatgatgagaatcaggaccgtggtaactggtccaaaaaatcggattatcttctatctatgattggatacgcagtgggattaggaaatgtgtggagatttccatatctgacctacagcaatggtggaggcgccttcttgataccttatgcaattatgttagcattggctggtttacctttgttctttctggagtgttcactgggacaatttgctagcttaggtccagtttcagtttggaggattcttccattgtttcaaggtgtgggaattacaatggtcctgatctccatttttgtgacaatctattacaatgtcataattgcctatagtctttactacatgtttgcttcttttcaaagtgaactaccatggaaaaattgttcttcgtggtcagataaaaactgtagcagatcaccaatagtaactcactgtaatgtgagtacagtgaataaaggaatacaagagatcatccaaatgaataaaagctgggtagacatcaacaattttacctgcatcaacggcagtgaaatttatcagccagggcagcttcccagtgaacaatattggaataaagtggcgctccaacggtcaagtggaatgaatgagactggagtaattgtttggtatttagcactttgtcttcttctggcttggctcatagttggagcagcactatttaaaggaatcaaatcgtctggcaaggtggtatattttacagctcttttcccctatgtggtcctactcatcctgttagtacgaggtgcaactctggagggtgcttcaaaaggcatttcatactatattggagcccagtcaaattttacaaaacttaaggaagctgaggtatggaaagatgctgccactcagatattttactccctttcagtggcttggggtggcttagttgctctatcatcttacaataagttcaaaaacaactgcttctctgatgccattgtggtttgtttgacaaactgtctcactagcgtgtttgctggatttgctattttttctatattgggacacatggcccatatatctggaaaggaagtttctcaagttgtaaaatcaggttttgatttggcattcattgcctatccagaggctctagcccaactcccaggtggtccattttggtccatattattttttttcatgcttttaactttgggtctcgattctcagtttgcttcgattgaaacgatcacaacaacaattcaagatttatttcccaaagtgatgaagaaaatgagggttcccataactttgggctgctgcttggttttgtttctccttggtctcgtctgtgtgactcaggctggaatttactgggttcatctgattgaccacttctgtgctggatggggcattttaattgcagctatactggagctagttggaatcatctggatttatggagggaacagattcattgaggatacagaaatgatgattggagcaaagaggtggatattctggctatggtggagagcttgctggtttgtaattacgcctatccttttgattgcaatatttatctggtcattggtgcaatttcatagacctaattatggcgcaattccataccctgactggggagttgctttaggctggtgtatgattgttttctgcattatttggattccaattatggctatcataaaaataattcaggctaaaggaaacatctttcaacgccttataagttgctgcagaccagcttctaactggggtccatacctggaacaacatcgtggggaaagatataaagacatggtagatcctaaaaaagaggctgaccatgaaatacctactgttagtggcagcagaaaaccggaatgagatctcattgaaaaaaatatatgattgtataatgtgattttttttagaatagggggaaccttatttatttgtgtgttaactgaataggaaaatgtacatactatgttcatgatagtgtgatttttttcacatttaagcaggaatgcaatataaaaatgtgaatctcttaattctcagccatgtgcttattatatttctttttagattgtctatctgtataacacacacacacacacctaagagtctctatttcacaattatatttttgtaaatagtatatgcatttttaatacattggaggctttattttgaactaatttcttagagaatagttatattttctattacacaagtttaaaaatattattaacttgtattttcttaatatacaatctatcttttccacaaatatgagtgggaaataaatcagcacatttgaaagaaagtgttaaaactgaaggcctcacttaattagaaacgtgataaatatatggacaaatggactatacatactataagaggactgtagtttaatactttttacccaaatatgtttaaaaacttcgtgcatttgttacagctcatgttttctatatgaacttagtcattaatgttctttataaaaagtgaaataagatggaaaaataaggatcctacagccagtaagtgataaatctagaaaattgagttttgagtacctcttttcccatatacaatcttccttccttaggtaatttggaagaaaactatgacccatttaatttctattgtgtttcacaaaattaagtgttgttcattatactctctgaaatataggtttaatttcaaatagaatatggacttaaatgttaatgagaaaatggctttaatcaattctagcattttattactgtaatacagggctgatagagtgattttgtcttatatgagtaagttactacttacaggtgataacttgcatactattggaagataaacttgtcaaacttgtcaagaatgagaaaagccaaattagaaaatcctatgtcctagtttccttaccaaggataattaaatatatcactaagagctttatatattgattatatattgttgacaactggtttaagcatcatagcctatgatgataaacactgcctatatatgtaaatagcttttcatcaattcttaaatttcttaacctaggcttcagggagcatatgaaaccaaaattatatggaacattttctgtgtgtacatgtacatgcatttttctagggagagagtccgtaggtttatcagaatatcaaggaaaactgtgacccaaagaagtttaagaatcacatacagtgctgctggctttttgtgcttggcaaatgagtgacaatagaagaaataatttttcttacacattttaaaacgttttctcttccttgtgattgaagatgaaaggagtaagaaattaaggcatttgtttaatttatactggtaacttatttaggggggaggggacatgaaggtaggtaaataggtaggcctctaattgaaccacctctctaagttatgtacgtatatataagctgaaattgtgtttgacattctgagggttttctttttcttttttctttttttttttttttggtggggggctgggggtcagagtcttgttctgttgcctgggctggagtgcagtggcatgatctcagctcactgcaacctctgccttctggattcaagtgattctcctgcctcagcctcttgagtagctgggactacaggtgcccgccaccacaccagctaatttttgtatttttagtagaggcgaagtttccccatgttggccaggctggtcttgaactcccgacctcaagtgatctgtctacctcggcctcctaaagtgctgagattacaggtgtgagccaccgtgcccggcccattctaagggttttctttgaagacaggtcaaatgctgttagtaagtttcaggagattgttaattcctcagttataccagattttataaaatatttgagaatagatggctaacaagaggttagaaatacttttccttaattttaatccacagtatgttacatgcattctaccactacattttggtgctatttaaggtgtgcaattttctataggtgacttttgcaattcagggaagatttgggcatattaaatgaaagaatatctaattgggggaggtgtgaagggaaagaaattcttttcaaaagctgaccacaaagagtagttaaaagtttttgtcactatcttcacaagtgtgtaaagcacagatttcaacagagtgcttggcatattgtagggtgctcaatggtggtttttattattattactcagattccacagtggcaagaaacatcattctacataatggaaaacatttacatcaaatcccacttactttaatgcgaacttggagataatttatggtattgtattgtaaaccattaatgaaaactttttcacagttgagtgaaattaaaatcactatatctc

SEQ ID NO: 30308 - protein, 642 aa, Homo sapiens; identical to SEQ ID NO: 4229

SEQ ID NO: 30309 - DNA, 547 bp, Homo sapiens
ataaagcgggacaacacagaacttcccagttacaccaggcatcctggcccaaagtttcccaaatccaggcggctagaggcccactgcttcccaactaccagctgagggggtccgtcccgagaagggagaagaggccgaagaggaaacatgaacttctatttactcctagcgagcagcattctgtgtgccttgattgtcttctggaaatatcgccgctttcagagaaacactggcgaaatgtcatcaaattcaactgctcttgcactagtgagaccctcttcttctgggttaattaacagcaatacagacaacaatcttgcagtctacgacctctctcgggatattttaaataatttcccacactcaatagccaggcagaagcgaatattggtaaacctcagtatggtggaaaacaagctggttgaactggaacatactctacttagcaagggtttcagaggtgcatcacctcaccggaaatccacctaaaagcgtacaggatgtaatgccagtggtggaaatcattaaagacactttgagtagattc

SEQ ID NO: 30310 - protein, 113 aa, Homo sapiens; identical to SEQ ID NO: 4231

SEQ ID NO: 30311 - DNA, 485 bp, Homo sapiens
cccaaaacaggctgactaggggcctactgcttcccaactaccagctgagggggtccgtcccgaaaagggagaagaggcctaagaggaaacatcaacatctttttactcctagcgagcggcattctgtgtgccttgattgtcttctggaaatatcgctttcagggaaacaatggcgaaatgtcatcagtttcaactgcttttgcactactaagacgcttttctgggttaattagcagcaatacagacaacgatcttttattcaacaacctctctcgagatattttaaataatttctcacactcgaaaaacatgcagaagcgactattggcaaacctgaagagggtggaataccaaatggctgaactggaatattttctagttagcgagggtttgagaggtgcgtcaggtctccagaaattcacctcaaaagcgtacaggatgtaatgccagtggtggaaatcattaaagacactttgagtagattc

SEQ ID NO: 30312 - protein, 88 aa, Homo sapiens
MSSVSTAFALLRRFSGLISSNTDNDLLFNNLSRDILNNFSHSKNMQKRLLANLKRVEYQMAELEYFLVSEGLRGASGLQKFTSKAYRM

SEQ ID NO: 30313 - DNA, 4147 bp, Homo sapiens
ccctccgaaatctcgcgagggtaggtgcgcgtcggtattttgcgggcaactagctcttccagctgctgtaaattgctgctgcgggagaaactggagccgctgtagccggcgcgcccttcttcccttactgcgaggagccaccgcctctttcgcgctccttatacacctatcactgggagcggtggcagcaacattccctggaccaaccgccgcctcttcaggcggccgctttgccggtcattcccgaagcccggcaactgagggcggccccctttccttaacagtctcctcgctacagatcgtctgctccctcagcctcgcccgagacccacttccccagtctcgcccgggtggaggtcgacgaggaggagacaagagtcacccttcctccaggcggcgccggccccctcacccgcgggtgtgtcctataaatggcgtcggaaagcgacaccgaggaattctatgatgcccctgaagatgtgcacctagggggcggctaccccgtggggtctccaggaaaagttgggctttcaacattcaaggaaacagagaacactgcatacaaagttggaaatgagtcccctgtacaagaattgaaacaagatgtgtctaaaaagattattgaaagtattattgaggagagtcagaaagtactacagcttgaagatgactctttggattccaaaggaaaagaactctctgatcaagctactgccagtcctattgtggctagaacagatctgagcaatatacccggactgttagccatagatcaagtactaccggaagaatcccaaaaggcagagagtcagaatacatttgaagagactgaattagaattaaaaaaatgctttccttctgatgaaacctgtgagaaaccagtagatgaaaccacgaagttaactcaaacaagttcaactgagcagcttaatgtgcttgaaactgaaacagaagtattgaacaaggaagcagtggaagtcaaaggaggtggtgatgttttagagcctgtgtcctcagactccttatctactaaagattttgccgctgtggaagaagtggcccctgccaaacccccaagacaccttactccagagcctgatatagtggctagtacaaagaagcctgttccagcacgcccacctcctccaactaatttcccacctcctagacccccacctccttctcgacctgctccaccaccaagaaaaaggaaaagcgaattggaatttgagactctgaaaactcctgatatagatgttcccaaagagaatattacgtctgattctctcctaaccgcaagcatggcttcagaaagtacggttaaggattctcagccttctcttgatttggcaagtgctaccagtggagataaaatagttaccgcccaggaaaatggaaaagcacctgatgggcagactgtagcaggtgaagtgatgggccctcagagacctagatccaactctgggagagagcttactgatgaggaaattttagccagtgtaatgattaagaacctggatactggagaagaaatacctttgagtcttgcagaagagaaactaccaacaggcattaatcctctcactctacacatcatgagaaggacaaaagaatatgtaagtaatgacgcggcacagtcagatgatgaagagaagttacagtctcagccaacagatactgatggtggaaggttaaaacagaaaacgactcaactaaagaagtttcttggaaaatcagtaaagagagcaaagcaccttgctgaggaatatggtgaacgtgctataaataaagttaaaagtgttagagatgaagtgtttcatactgatcaagatgatccttcatcaagtgatgatgaaggaatgccatacacaagaccagttaaattcaaagcagcacacggtttcaaaggaccttatgattttgatcagatcaaagtggtgcaagatcttagtggtgaacatatgggagctgtttggaccatgaaattttctcactgtggccgattacttgcctcagctggacaagacaatgtagtgagaatatgggctttaaaaaatgcttttgactatttcaacaatatgcgaatgaaatacaatactgaaggacgtgtgtccccatcaccctctcaggaaagtctaagttcatcaaaatcggatacagatacaggggtatgcagtggaactgatgaagaccctgatgataaaaacgcaccctttcggcaacggccattttgcaaatataaaggacatactgctgatctccttgatctttcatggtctaaaaactactttcttctttcttcttcaatggataaaacagtcagattatggcacatttctcgaagagaatgcctttgctgttttcaacatatagattttgtcactgccatagcttttcatccaagagatgacaggtattttctaagtgggtctttggatggaaagctccgcctttggaacatacctgacaaaaaagtggctttgtggaatgaagtagatggtcagacaaaattgatcacagctgcaaatttctgtcagaatggcaaatatgcagtgattgggacatatgatggcagatgtattttctatgatacagagcatttgaaataccatacacaaatacatgtccgatctactagagggcgcaacaaggttggaagaaaaattactggcattgagcctttacctggagaaaataagatattggtaacctcaaatgactccagaatcagactatatgatttgagagatttgtcactatccatgaagtataagggttacgtcaatagcagcagccagatcaaagcaagtttcagccatgattttacttacctcgttagtggttcagaagataagtatgtttatatctggagtacctaccatgacctaagcaagtttacttcagtcaggagagatcgtaatgacttctgggaaggtattaaagcccacaatgcagttgttacatcagccatctttgcaccaaacccaagtttgatgttatctttggatgtgcaatctgaaaaatcagaagggaacgagaaaagtgaagatgctgaagttttggatgccacaccttctggtattatgaagacagataacacagaagttcttctctctgctgacttcactggagcaatcaaagtgtttgttaataaaagaaaaaatgtatcttaatttgaaatggcatttaaaataaacatatcagtaagtttctatatgtatcaaaactgaaaaaatagtgttccaggctaacatacttttttaatttttattgaaagttgttcaaatataatatattttttgagaggcagtgttaatgatctaggaaaccctgggctgatagagtagaaaggaatatggctagaataacattgccaaacattaggctttatgttttgttatgtttgtgttttcgttgtataattatgaacatgcacaagtttctgcatgaaaagatattaatatattaatcacatgtatgtgccttttggttacatgcattaaatctaacagagttaaattatttcagtggctcttttggcctcttactaggggggatagtcttgtttctagcttaaacaattttttttttgcacaaaatttcatttttaataaaagtggtatcttttgactgagttattgttttgaaaatggtatataggtttccagtaggtcaacaaccatatgtaaatggtttttataaatttctcaatttggggacaagatttttttgtggtctaaattgtgggcttaagattcttttctttatatgtgtacatataatttttttttctttgccacactggagcacaatgtttctatgtaaagaattattttcattctttatccatgagcaccaggctttgctcacttaaaaaaaaattaagccacattaaggagtgagtcttcttttttacaataatgtaaaaattaaactgtttacatttttttaaagcattgtagtttttaaaaattaagctgttttgttttgtgttgttgaatttgaaagcctttgtaaatatcaatataatgtaccaatgaaataacatctggggcaatgaaaccctgatcatgttgttgatggttagcatatgtttctgaaaattaaatatgtattattaaaagttggtctccaacacttgtttaaa

SEQ ID NO: 30314 - protein, 913 aa, Homo sapiens; identical to SEQ ID NO: 4233

SEQ ID NO: 30315 - DNA, 3274 bp, Homo sapiens
ccctccgaaatctcgcgagggtaggtgcgcgtcggtattttgcgggcaactagctcttccagctgctgtaaattgctgctgcgggagaaactggagccgctgtagccggcgcgcccttcttcccttactgcgaggagccaccgcctctttcgcgctccttatacacctatcactgggagcggtggcagcaacattccctggaccaaccgccgcctcttcaggcggccgctttgccggtcattcccgaagcccggcaactgagggcggccccctttccttaacagtctcctcgctacagatcgtctgctccctcagcctcgcccgagacccacttccccagtctcgcccgggtggaggtcgacgaggaggagacaagagtcacccttcctccaggcggcgccggccccctcacccgcgggtgtgtcctataaatggcgtcggaaagcgacaccgaggaattctatgatgcccctgaagatgtgcacctagggggcggctaccccgtggggtctccaggaaaagttgggctttcaacattcaaggaaacagagaacactgcatacaaagttggaaatgagtcccctgtacaagaattgaaacaagatgtgtctaaaaagattattgaaagtattattgaggagagtcagaaagtactacagcttgaagatgactctttggattccaaaggaaaagaactctctgatcaagctactgccagtcctattgtggctagaacagatctgagcaatatacccggactgttagccatagatcaagtactaccggaagaatcccaaaaggcagagagtcagaatacatttgaagagactgaattagaattaaaaaaatgctttccttctgatgaaacctgtgagaaaccagtagatgaaaccacgaagttaactcaaacaagttcaactgagcagcttaatgtgcttgaaactgaaacagaagtattgaacaaggaagcagtggaagtcaaaggaggtggtgatgttttagagcctgtgtcctcagactccttatctactaaagattttgccgctgtggaagaagtggcccctgccaaacccccaagacaccttactccagagcctgatatagtggctagtacaaagaagcctgttccagcacgcccacctcctccaactaatttcccacctcctagacccccacctccttctcgacctgctccaccaccaagaaaaaggaaaagcgaattggaatttgagactctgaaaactcctgatatagatgttcccaaagagaatattacgtctgattctctcctaaccgcaagcatggcttcagaaagtacggttaaggattctcagccttctcttgatttggcaagtgctaccagtggagataaaatagttaccgcccaggaaaatggaaaagcacctgatgggcagactgtagcaggtgaagtgatgggccctcagagacctagatccaactctgggagagagcttactgatgaggaaattttagccagtgtaatgattaagaacctggatactggagaagaaatacctttgagtcttgcagaagagaaactaccaacaggcattaatcctctcactctacacatcatgagaaggacaaaagaatatgtaagtaatgacgcggcacagtcagatgatgaagagaagttacagtctcagccaacagatactgatggtggaaggttaaaacagaaaacgactcaactaaagaagtttcttggaaaatcagtaaagagagcaaagcaccttgctgaggaatatggtgaacgaatgccatacacaagaccagttaaattcaaagcagcacacggtttcaaaggaccttatgattttgatcagatcaaagtggtgcaagatcttagtggtgaacatatgggagctgtttggaccatgaaattttctcactgtggccgattacttgcctcagctggacaagacaatgtagtgagaatatgggctttaaaaaatgcttttgactatttcaacaatatgcgaatgaaatacaatactgaaggacgtgtgtccccatcaccctctcaggaaagtctaagttcatcaaaatcggatacagatacaggggtatgcagtggaactgatgaagaccctgatgataaaaacgcaccctttcggcaacggccattttgcaaatataaaggacatactgctgatctccttgatctttcatggtctaaaaactactttcttctttcttcttcaatggataaaacagtcagattatggcacatttctcgaagagaatgcctttgctgttttcaacatatagattttgtcactgccatagcttttcatccaagagatgacaggtattttctaagtgggtctttggatggaaagctccgcctttggaacatacctgacaaaaaagtggctttgtggaatgaagtagatggtcagacaaaattgatcacagctgcaaatttctgtcagaatggcaaatatgcagtgattgggacatatgatggcagatgtattttctatgatacagagcatttgaaataccatacacaaatacatgtccgatctactagagggcgcaacaaggttggaagaaaaattactggcattgagcctttacctggagaaaataagatattggtaacctcaaatgactccagaatcagactatatgatttgagagatttgtcactatccatgaagtataagggttacgtcaatagcagcagccagatcaaagcaagtttcagccatgattttacttacctcgttagtggttcagaagataagtatgtttatatctggagtacctaccatgacctaagcaagtttacttcagtcaggagagatcgtaatgacttctgggaaggtattaaagcccacaatgcagttgttacatcagccatctttgcaccaaacccaagtttgatgttatctttggatgtgcaatctgaaaaatcagaagggaacgagaaaagtgaagatgctgaagttttggatgccacaccttctggtgcagtggctcatgcctgtaatcccagcactttgggaggccgaggcaggcggatcacttgaggtcagcagttcgagaccagtctggccaacatggcgaaaccctgtctctactaagaatacaaaaattagtcaagcgtggtgatatgtgcctgtaatcccagctcctcgggaggctaaagcaggagaatcgcttgaatctgcgaggcagaggttgcggtgaactgagatcccacccctgcactccagcctgggcaacagagcgagactccgtctcc

SEQ ID NO: 30316 - protein, 875 aa, Homo sapiens
MASESDTEEFYDAPEDVHLGGGYPVGSPGKVGLSTFKETENTAYKVGNESPVQELKQDVSKKIIESIIEESQKVLQLEDDSLDSKGKELSDQATASPIVARTDLSNIPGLLAIDQVLPEESQKAESQNTFEETELELKKCFPSDETCEKPVDETTKLTQTSSTEQLNVLETETEVLNKEAVEVKGGGDVLEPVSSDSLSTKDFAAVEEVAPAKPPRHLTPEPDIVASTKKPVPARPPPPTNFPPPRPPPPSRPAPPPRKRKSELEFETLKTPDIDVPKENITSDSLLTASMASESTVKDSQPSLDLASATSGDKIVTAQENGKAPDGQTVAGEVMGPQRPRSNSGRELTDEEILASVMIKNLDTGEEIPLSLAEEKLPTGINPLTLHIMRRTKEYVSNDAAQSDDEEKLQSQPTDTDGGRLKQKTTQLKKFLGKSVKRAKHLAEEYGERMPYTRPVKFKAAHGFKGPYDFDQIKVVQDLSGEHMGAVWTMKFSHCGRLLASAGQDNVVRIWALKNAFDYFNNMRMKYNTEGRVSPSPSQESLSSSKSDTDTGVCSGTDEDPDDKNAPFRQRPFCKYKGHTADLLDLSWSKNYFLLSSSMDKTVRLWHISRRECLCCFQHIDFVTAIAFHPRDDRYFLSGSLDGKLRLWNIPDKKVALWNEVDGQTKLITAANFCQNGKYAVIGTYDGRCIFYDTEHLKYHTQIHVRSTRGRNKVGRKITGIEPLPGENKILVTSNDSRIRLYDLRDLSLSMKYKGYVNSSSQIKASFSHDFTYLVSGSEDKYVYIWSTYHDLSKFTSVRRDRNDFWEGIKAHNAVVTSAIFAPNPSLMLSLDVQSEKSEGNEKSEDAEVLDATPSGAVAHACNPSTLGGRGRRIT

SEQ ID NO: 30317 - DNA, 2650 bp, Homo sapiens
ttagtaattgttttataaatttgggagctccagtcttaggtgcataaatgtttaggattgtgatattttcctgttgccaaggctggagtgcagtggcacgatctcagctcactgcaacctccatctcccaggttcaagcgattctcctgcctcagcctccccgagtagctggaattacaggcgtgggccaccacgcccagctaatttttttttttatttttagtggagatggggtttcaccatggtggccagactgatctcgaactcctgacctcaaatgatccacctgcctcagcctcccaaagtgctgggattacaggcatgggccactgtgtccagccaaataaagtcagttttaatgaacataggttcatggtgtgccataggttaagtttttatacagttggtattaatcaacaggaaattataatgcaaactgcatatactcttaaaaacttttctggaactgagtggatcttgaaaataaaaatgattgttagatatttcaaagattattgtaaatttccaaattctgttttttaattctttacttttaatcataaagtataccatctatttgaaaacaggtataccacaatgtacctacttcatagtgttgctatataatgcgaagaacaatgcttaacacatcgtaagtatgcgatcaatgtcaccattgccttgatttgtttagcacctttaggcacaccaaagaatacagaggtatcatttgagttttctcattcagtataactcatagttctcctccttaaatagattatgttgaggaattaatgagcttctgccagctgaaagcttttgacagatagatgtttgtttcctgggcgatggggccatcacggtgcctaagtcagttacactaccatcttctagccttgaacattctgtgatctattctgaaagatttgacaatttctattctctaattttcttgcctagagtgtgacaggtgcacaataacttttcatttccatgctgcattatagggtaatctttttgaagacattttaaatgacaattagagatctatgtgagttaaaattcaccagtgttatcaatgtgaaaataactgaagtgacaataaaatgaatacactatcgtgtttgtcttggtatccaatttgtcagttatcctgaagtaaattttttccacagcccacaatgcagttgttacatcagccatctttgcaccaaacccaagtttgatgttatctttggatgtgcaatctgaaaaatcagaagggaacgagaaaagtgaagatgctgaagttttggatgccacaccttctggtaaatctttacttgtcctatatttttttctagtcagcacttagtagcctcatttatctcatttgagtataataaggttttcactagtataaagaatatttcttttttcttttttcttaagacagggtcttgctctgtcacccaggctggagcgcagtgacgcagtcacacacagctcactgcagcctcaaccaccctggactcaggtgatccttccacctcagcctcccaagtagctgggactatgggcctacaccaccatgcccagctaatttttgtattttttgtagagatgggatttcaccatgttgcccaggctggtctcaaacttctgggctcaagcaatgcacccacctcagcactttgggaggccaaggcagatggatcacgaggtcaggagatcgagaccatcctggctaacacggtgaaaccccgtctctactaaaaatacaaaaaattagccgggcatggtggcgggtgcctgtaatcctagctactcgggatgctgaggcaagagaatggtgtgagcccgggaggcagagcttgcagtgagctgagatcgcgccactgcactccagcctgtgtgacagagcaagactccatctcaaaaaaagaaaagagaaatttggatgttcataactatgggtaaccattctctttagagaagtgcaaacaatatatgcaaatgtaaaacttctttattacctgtctctcctactagtctgtaatctctagaagacagagacttttcatgtcttatttattgctgtattgccagtgtctctcacaatgcttgcctacacatagtaggtgcttgatgaacatgtgctgactaaatgaattaaacccaaatgaagcagggctaatttttctacttgccacaagttaacagcttcttgagataggtggctatttacaagtttgtaatttcttgccatttgtagcatatatgctttgagaatgaatattaattccagttatatacaatgctcatattaggaagggagaagaaactgtcagcaagtaatattgagtgccaatcagttatataaaaatctgggccaggtgcggtggctcacgcctgtaatcccagcactttgggagaccaaggcaggcggattatgaggttgagagttcgagaccatcctggccaacatggtgaaaccccgtctctactgaaaaactgcaaaaattagctgggcgtggtagtgcacgcctgcagtcccagctactcaggaggctgaggctggagaatcgcttgaaccagggaggtggaggttgcagtgagccgagatcacgccactgcactccagcctggtgacagagggagactccatctc

SEQ ID NO: 30318 - protein, 69 aa, Homo sapiens [sequence omitted]

SEQ ID NO: 30319 - DNA, 6634 bp, Homo sapiens
cgcgggccggggcagtgagtccacccgcccgccgaggtccgcccgcccgccgagacccgcccgccgccgctgccatggccgaagtgcgcaaattcaccaaacggctcagcaagcctggcacggcggctgagctccggcagagcgtgtctgaggccgtgcggggctccgtggtgctggaaaaggccaaagttgttgagcccctggactatgagaatgttattgcccaaagaaaaacccagatttacagcgaccccctccgagatctgcttatgttcccaatggaagatatatctatctcggtgataggtcgtcaacgcagaacggtgcagtctactgtaccagaagatgctgaaaagagggcccagagtttatttgttaaagagtgtattaaaacctatagcacagattggcacgtggtaaactacaagtatgaggacttctctggggactttcgaatgttgccatgtaaatctttgagaccagaaaagattcctaatcatgtatttgagatagatgaagactgtgagaaagatgaggactcatcttctttatgttctcagaagggtggtgtgataaaacaaggctggttgcataaagcaaatgtaaatagtaccatcacagtaaccatgaaggtattcaagagacgatatttttacttgacccaacttcctgacggttcatatattctcaattcctataaagatgagaaaaattcaaaagaatcgaaaggttgcatctacttggacgcctgcattgatgttgttcagtgccccaaaatgcgccgtcatgcttttgaactcaagatgttagataaatatagccattatctggctgctgaaactgagcaggaaatggaggaatggttgataactttgaaaaagattattcagatcaacaccgacagtttagttcaagaaaaaaaggagacggtagaaacagcacaagatgatgaaactagcagccaaggaaaagccgagaacatcatggcaagtttggaaaggagcatgcatccggaactgatgaagtatggaagagaaactgaacaactaaacaaactcagtagaggagatggaagacagaatctcttttcttttgattcagaagttcagaggttggacttttcaggaattgaacctgatataaagccatttgaagaaaaatgcaataaacgtttcctggtgaattgccatgatttaactttcaatatcttgggccaaattggagacaatgcaaaaggaccacccacaaatgttgagcccttttttatcaatcttgccttatttgatgtaaagaacaattgtaagatttcagcagactttcatgtagacctgaatcccccatctgtccgtgaaatgctgtggggctcttcaacccaactggccagtgacggtagcccaaagggctcttcacccgaatcttacattcatggaattgccgaatctcagttacgctacatacaacagggaattttctcagtgacgaatccacatcctgaaatttttctagttgccagaattgaaaaggtactacagggaaacattacacactgtgcagaaccctatatcaaaaattctgatccagtaaagacggcccagaaggtgcacaggacagctaaacaagtgtgtagccgccttggacaatacagaatgcccttcgcttgggctgccagacccattttcaaagatactcaaggctctcttgatctggatgggagattttctcctctgtataaacaagacagtagcaagctttcaagtgaagacattctcaagttgctctcagaatataagaagccagaaaagaccaaactgcagattattcctgggcagctaaacatcacagtagaatgtgttcctgtggatttatcaaattgtattacttcttcatatgtgcccttgaagccttttgaaaagaattgccaaaatattactgtggaggttgaagagtttgttccagaaatgacaaaatattgttatccatttactatttacaaaaaccatctgtatgtatatcccctgcaattaaaatacgatagccagaaaacatttgccaaggcaaggaacattgcagtctgtgtggaattccgggattcagatgaaagtgacgctagtgccctaaagtgtatttatggaaaacctgcagggtctgtttttaccacaaatgcttatgctgttgtctcgcatcacaaccaaaatccagagttctatgatgagattaaaattgagcttcccattcacctacatcaaaaacatcatttgcttttcactttttatcatgtaagttgtgaaattaacacaaagggaacaaccaaaaagcaagacacagttgaaactccagttgggtttgcctgggtacctttgctgaaagatggtagaatcatcacatttgagcagcagctgccagtttccgccaatcttcccccaggctacttgaatctgaatgatgcagaatcaagaaggcaatgtaacgtggatattaaatgggtagatggtgcaaagcctttgttgaagattaaaagccacttagaatctaccatttacactcaagatctgcatgtgcacaaattcttccatcattgccagctgattcagtcaggctcgaaagaagttccaggggagctcattaaatatttaaagtgtttgcatgccatggagatccaagtcatgatacagtttctacctgtaattcttatgcaactcttccgagttctcacaaatatgacccatgaagatgacgttcctatcaactgcaccatggttctcttacatattgtatcaaagtgccatgaagaaggcttggatagttatctaagatcattcataaagtatagcttccgacctgaaaaaccgagtgctcctcaggcccagctgatacatgaaaccctggctactacgatgatagcaatattgaaacagtctgcagattttttatcaataaacaaattgctaaagtactcatggtttttctttgaaataattgcaaagtcaatggccacatacttgttggaagagaataagattaagcttccccgaggccagagatttcccgagacatatcatcatgtcttacattcactgcttcttgcaataattccccatgtgactattcggtatgcggagattcccgatgagtccagaaatgtgaactatagtttggctagcttcctgaagcgctgtttgacactaatggatagaggatttattttcaatttaataaatgactatatatctggattcagccccaaagatcctaaggttctggctgaatacaagtttgaatttctgcaaacaatttgcaatcacgaacattacattcctctgaacttgccaatggcatttgcaaaacctaaactgcagcgggttcaagattcaaatcttgaatacagtttatcagatgagtattgcaagcatcacttcttggttggtctacttctgagggaaacttccattgctcttcaggacaattatgagatcagatatacagctatctctgttataaagaatcttttgataaaacatgcatttgacacaagataccagcacaagaaccaacaagccaaaatagcacaattgtacctcccctttgttggactacttttggaaaatatacagcgattagcaggtcgagataccttgtattcttgtgcagccatgcctaattctgcatccagagatgagtttccatgtggctttacttcacctgccaatagagggagtctgagcactgacaaagacaccgcttatgggtcttttcaaaatggacatggaattaagagagaagattcaagaggttccctcatcccagaaggagcaacaggatttccagatcagggcaacactggtgaaaatacccgacagagttctacaaggagtagtgtatcccagtataaccgcctggatcagtatgaaatcagaagcctcctgatgtgctacctgtatatagtaaaaatgatttcagaagatactctcttaacttactggaataaagtatcacctcaggagctcataaacattcttatacttttagaagtatgcttgtttcactttagatatatggggaaaagaaacatagcaagggtgcatgatgcctggctgtcaaaacacttcggaatagaccgaaaatcgcaaaccatgcctgctcttcgaaacagatcaggagtaatgcaggcccggcttcagcatcttagtagcctagaaagttcatttacacttaatcacagttctacaacaactgaagcagacattttccaccaggcacttcttgaaggcaatacagctactgaagtttccctaacagtactagacaccatatcatttttcactcagtgcttcaagacccaacttttaaataatgatggccataacccattaatgaaaaaagtgtttgatatacatcttgcttttcttaaaaatggacaatctgaagtgtcgctgaaacatgtatttgcctcactgagagctttcatcagtaagtttccttcagcatttttcaaaggaagagtaaacatgtgtgctgcattttgctatgaggttttaaagtgctgcacatcgaagattagctcaaccaggaatgaagcatctgcacttttgtatcttttgatgagaaacaactttgagtataccaaaaggaaaacctttttgaggacacatctacagataataattgctgtaagccaactgatagctgatgtagcactaagcggaggatcaagatttcaggagtctttattcattatcaataattttgcaaatagtgacagacctatgaaggcaactgcctttcccgcagaagtcaaagacttgaccaagagaatccgcactgttcttatggccactgcccaaatgaaggagcatgagaaagaccctgaaatgctaattgatctccagtatagcttagccaagtcctatgcaagcaccccagagctcaggaaaacctggcttgatagcatggccaagattcatgtaaaaaatggagatttttcagaggctgcgatgtgttatgtccatgtagcagctctagttgcagagtttcttcatcgaaaaaaattatttcctaacggatgttcagcgttcaagaaaattactcccaatatagatgaagaaggagcaatgaaagaagatgctgggatgatggatgtccattatagtgaagaggtcttgctggagttgctagaacaatgtgtggatggcttatggaaggcagaacgttatgaaataatttctgagatttccaagttgatcgttccaatttatgagaaacgtcgtgagtttgagaaacttactcaagtttatagaactcttcatggagcttacacaaaaattctggaagttatgcatacaaaaaagagacttttaggcactttcttcagagttgccttttatggccaatctttttttgaagaagaagatggaaaggagtacatctataaagaaccaaagctcactggcctctcagaaatttccttgagacttgttaaactttatggtgaaaagtttggtacggagaatgtcaaaataattcaggattcagacaaggtaaatgccaaagagcttgatccaaaatatgctcatatacaagttacttatgtgaagccttactttgatgacaaagaactcacagaaaggaagaccgagtttgaaagaaatcataatatcagcagatttgtttttgaggccccttacactttatcaggcaaaaaacagggctgtatagaagaacagtgcaaacgccgtacaatcttgacaacttcaaactcgtttccttacgtgaagaagaggattcctattaactgtgaacagcagattaatttaaaaccaattgatgttgccactgatgaaataaaagataaaactgcagagctgcaaaagctttgctcctctactgacgtggacatgattcagctccaacttaaattgcagggctgtgtttctgtgcaggtcaatgctggtccattagcatatgcaagagctttcttaaatgacagccaagctagcaagtatccacctaagaaagtgagtgagttgaaagacatgtttaggaaatttatacaagcatgcagcattgcacttgaactaaatgagcggctaattaaagaagatcaagttgagtaccatgaagggctaaagtcaaatttcagagacatggtaaaagaattatctgacattatccatgagcagatattacaagaagacacaatgcattctccctggatgagcaacacattacatgtattttgtgcaattagtggtacatcaagtgaccgaggttatggttccccaagatacgctgaagtgtgaggaaatgcagatgtacgtgacaatgagactgacctttctcaggaatatttggagctgtgcaaatgttaaaatttaaagatttgatatacatggagtgtttcttctcgacaccaaaattttcatgtgttccaacagggtgcttacatatttgtaaataagcaacttgaaagtgcctggaaaattgcaccactgtgcttggtttgtacttttttaggtaaatctatatgctgaaaagtagagctcaaaaacagtagttcaatttgcttaattattgcttaaaataatggtactatgtaaaattgtataatggaatacaataaaaggtaaaacttatttgt

SEQ ID NO: 30320 - protein, 2073 aa, Homo sapiens
MAEVRKFTKRLSKPGTAAELRQSVSEAVRGSVVLEKAKVVEPLDYENVIAQRKTQIYSDPLRDLLMFPMEDISISVIGRQRRTVQSTVPEDAEKRAQSLFVKECIKTYSTDWHVVNYKYEDFSGDFRMLPCKSLRPEKIPNHVFEIDEDCEKDEDSSSLCSQKGGVIKQGWLHKANVNSTITVTMKVFKRRYFYLTQLPDGSYILNSYKDEKNSKESKGCIYLDACIDVVQCPKMRRHAFELKMLDKYSHYLAAETEQEMEEWLITLKKIIQINTDSLVQEKKETVETAQDDETSSQGKAENIMASLERSMHPELMKYGRETEQLNKLSRGDGRQNLFSFDSEVQRLDFSGIEPDIKPFEEKCNKRFLVNCHDLTFNILGQIGDNAKGPPTNVEPFFINLALFDVKNNCKISADFHVDLNPPSVREMLWGSSTQLASDGSPKGSSPESYIHGIAESQLRYIQQGIFSVTNPHPEIFLVARIEKVLQGNITHCAEPYIKNSDPVKTAQKVHRTAKQVCSRLGQYRMPFAWAARPIFKDTQGSLDLDGRFSPLYKQDSSKLSSEDILKLLSEYKKPEKTKLQIIPGQLNITVECVPVDLSNCITSSYVPLKPFEKNCQNITVEVEEFVPEMTKYCYPFTIYKNHLYVYPLQLKYDSQKTFAKARNIAVCVEFRDSDESDASALKCIYGKPAGSVFTTNAYAVVSHHNQNPEFYDEIKIELPIHLHQKHHLLFTFYHVSCEINTKGTTKKQDTVETPVGFAWVPLLKDGRIITFEQQLPVSANLPPGYLNLNDAESRRQCNVDIKWVDGAKPLLKIKSHLESTIYTQDLHVHKFFHHCQLIQSGSKEVPGELIKYLKCLHAMEIQVMIQFLPVILMQLFRVLTNMTHEDDVPINCTMVLLHIVSKCHEEGLDSYLRSFIKYSFRPEKPSAPQAQLIHETLATTMIAILKQSADFLSINKLLKYSWFFFEIIAKSMATYLLEENKIKLPRGQRFPETYHHVLHSLLLAIIPHVTIRYAEIPDESRNVNYSLASFLKRCLTLMDRGFIFNLINDYISGFSPKDPKVLAEYKFEFLQTICNHEHYIPLNLPMAFAKPKLQRVQDSNLEYSLSDEYCKHHFLVGLLLRETSIALQDNYEIRYTAISVIKNLLIKHAFDTRYQHKNQQAKIAQLYLPFVGLLLENIQRLAGRDTLYSCAAMPNSASRDEFPCGFTSPANRGSLSTDKDTAYGSFQNGHGIKREDSRGSLIPEGATGFPDQGNTGENTRQSSTRSSVSQYNRLDQYEIRSLLMCYLYIVKMISEDTLLTYWNKVSPQELINILILLEVCLFHFRYMGKRNIARVHDAWLSKHFGIDRKSQTMPALRNRSGVMQARLQHLSSLESSFTLNHSSTTTEADIFHQALLEGNTATEVSLTVLDTISFFTQCFKTQLLNNDGHNPLMKKVFDIHLAFLKNGQSEVSLKHVFASLRAFISKFPSAFFKGRVNMCAAFCYEVLKCCTSKISSTRNEASALLYLLMRNNFEYTKRKTFLRTHLQIIIAVSQLIADVALSGGSRFQESLFIINNFANSDRPMKATAFPAEVKDLTKRIRTVLMATAQMKEHEKDPEMLIDLQYSLAKSYASTPELRKTWLDSMAKIHVKNGDFSEAAMCYVHVAALVAEFLHRKKLFPNGCSAFKKITPNIDEEGAMKEDAGMMDVHYSEEVLLELLEQCVDGLWKAERYEIISEISKLIVPIYEKRREFEKLTQVYRTLHGAYTKILEVMHTKKRLLGTFFRVAFYGQSFFEEEDGKEYIYKEPKLTGLSEISLRLVKLYGEKFGTENVKIIQDSDKVNAKELDPKYAHIQVTYVKPYFDDKELTERKTEFERNHNISRFVFEAPYTLSGKKQGCIEEQCKRRTILTTSNSFPYVKKRIPINCEQQINLKPIDVATDEIKDKTAELQKLCSSTDVDMIQLQLKLQGCVSVQVNAGPLAYARAFLNDSQASKYPPKKVSELKDMFRKFIQACSIALELNERLIKEDQVEYHEGLKSNFRDMVKELSDIIHEQILQEDTMHSPWMSNTLHVFCAISGTSSDRGYGSPRYAEV

SEQ ID NO: 30321 - DNA, 657 bp, Homo sapiens
gaaattttaaaacttaaagctgtctcgagaaattattcttttatatttggctattctggttttgtggtagcaggataagttctgttaaggatagtgtgtggctgggcatgatggctagtgcctaaaatgccagcactttggcaggctgaggtaggaggattgttttgaactcctgacctcaggtgatccatccgcctgggcctcccaaggtgctggaattacaggcatgagccaccgtgcccggcccgttttttaaatggtgacaagaccttgagtttttatagccgaaatcttaagacttaaaaatgctgttatatctatctgtggcctcatatgtctacaggtcactactgaacacatatcacatagtcatcacccctcttctgtaagtggggaaacagaggcatggttttcagtgaggcaggccataggttatttatattaatgaaatgacagagcaggtaatgaactccaggtgtcctgattcctttggagtaaccatgtgaagaaatactagagggatgccagattccacagtcaatcaggtggagaaagctctttctgtgtggttttggtgatgatctcgctctattgggaaacagtgtttatttctaaacaagcttaggtctctttagtgggaaagtaggaggtgaggac

SEQ ID NO: 30322 - protein, 56 aa, Homo sapiens
VFIAEILRLKNAVISICGLICLQVTTEHISHSHHPSSVSGETEAWFSVRQAIGYLY

SEQ ID NO: 30323 - DNA, 1171 bp, Homo sapiens
aaagaagtcctggtttaaattgccaatatgatgggaaatgatttcccatacatgtgtttgcatctctctgctatgtatataatcaatttcatcatacatgactataaaatgataaaatacacatggatttttgaacaattttaggtcatgatgttttcttcttagtgttaaagaaactaaatttttcccatggaattgctattctcataatatttttatattgagtattcttcattcctactgttagacttcaatgcaaatattgacatcttaatataatagtatatgtaatatttgtttagttacttttggtcatttaatgattagggaatgaacatgctgagttgactgcagaaatcggtgaatcctaaatactagtttggcaaaggtgtatttcagacaggttgaagtattgacaaggcaaatagggcaaggagagaaatcttgcccaactgcggaagctagagggttatataaatggaagctatcctatgaaaagcaaatattaataacaactcaaagagtgagaatgttttgtttccacacagtcctctgaaggtttcagaaaaggaagccagcaaaactggctttgtggtaagacctagtaataaaaaataatgttttgctagaccctgaactaatagactcaggacctttaaatctgcatgttttaaagccttcagcttcttgtaaaaatatgatgaaccacttccttcagttgcctccaagataccttgttttccttctgatttagaaacaaatgtcatataattggcataattgaaaatgtctgaccatagggcactactgtttatctgtagctgaatttctatttagtggtttctcatttttacccacataattagtggcatgacttagaaggcctcccacattatttcctagttacatcgccagagttcatcactgaaaccttgtctccaaagaggtgggcacctaattatgtcctgcagagctgttgatacagaactgtaatgaaaactaatgaaattgattaacccagactatatttgatgaaggagttaaatacagtatgacactgtgagccctcttttttttgagacggagtctcactctgtcacccaggttggagtgcatgagccgagatcgcgccattgcgctccagcttgggcaacagagcgagacttcgtca

SEQ ID NO: 30324 - protein, 38 aa, Homo sapiens
MMGNDFPYMCLHLSAMYIINFIIHDYKMIKYTWIFEQF

SEQ ID NO: 30325 - DNA, 1126 bp, Homo sapiens
agagggagcgaaggaggcggggactgccaaggctccagcccggccgggctccgaggcgagaggctgcatggagtggccggcgcggctctgcgggctgtgggcgctgctgctctgcgccggcggcgggggcgggggcgggggcgccgcgcctacggaaactcagccacctgtgacaaatttgagtgtctctgttgaaaacctctgcacagtaatatggacatggaatccacccgagggagccagctcaaattgtagtctatggtattttagtcattttggcgacaaacaagataagaaaatagctccggaaactcgtcgttcaatagaagtacccctgaatgagaggatttgtctgcaagtggggtcccagtgtagcaccaatgagagtgagaagcctagcattttggttgaaaaatgcatctcacccccagaaggtgatcctgagtctgctgtgactgagcttcaatgcatttggcacaacctgagctacatgaagtgttcttggctccctggaaggaataccagtcccgacactaactatactctctactattggcacagaagcctggaaaaaattcatcaatgtgaaaacatctttagagaaggccaatactttggttgttcctttgatctgaccaaagtgaaggattccagttttgaacaacacagtgtccaaataatggtcaaggataatgcaggaaaaattaaaccatccttcaatatagtgcctttaacttcccgtgtgaaacctgatcctccacatattaaaaacctctccttccacaatgatgacctatatgtgcaatgggagaatccacagaattttattagcagatgcctattttatgaagtagaagtcaataacagccaaactgagacacataatgttttctacgtaaggttttaaaattattgtttttatttggctatttttcttttacttgaatttcttacattgaaatatcaatgaaacatagctcttacatttgtcaccttatgatgatgatggtaatgaaacttcttgtctaaaataaggcatggtggaagatttgaagatttatggtatgatagtatcagctgcaagtttcaagccatttattcatctgtaagcttcttagaaaggcct

SEQ ID NO: 30326 - protein, 279 aa, Homo sapiens
MEWPARLCGLWALLLCAGGGGGGGGAAPTETQPPVTNLSVSVENLCTVIWTWNPPEGASSNCSLWYFSHFGDKQDKKIAPETRRSIEVPLNERICLQVGSQCSTNESEKPSILVEKCISPPEGDPESAVTELQCIWHNLSYMKCSWLPGRNTSPDTNYTLYYWHRSLEKIHQCENIFREGQYFGCSFDLTKVKDSSFEQHSVQIMVKDNAGKIKPSFNIVPLTSRVKPDPPHIKNLSFHNDDLYVQWENPQNFISRCLFYEVEVNNSQTETHNVFYVRF

SEQ ID NO: 30327 - DNA, 1858 bp, Homo sapiens
agagggagcgaaggaggcggggactgccaaggctccagcccggccgggctccgaggcgagaggctgcatggagtggccggcgcggctctgcgggctgtgggcgctgctgctctgcgccggcggcgggggcgggggcgggggcgccgcgcctacggaaactcagccacctgtgacaaatttgagtgtctctgttgaaaacctctgcacagtaatatggacatggaatccacccgagggagccagctcaaattgtagtctatggtattttagtcattttggcgacaaacaagataagaaaatagctccggaaactcgtcgttcaatagaagtacccctgaatgagaggatttgtctgcaagtggggtcccagtgtagcaccaatgagagtgagaagcctagcattttggttgaaaaatgcatctcacccccagaaggtgatcctgagtctgctgtgactgagcttcaatgcatttggcacaacctgagctacatgaagtgttcttggctccctggaaggaataccagtcccgacactaactatactctctactattggcacagaagcctggaaaaaattcatcaatgtgaaaacatctttagagaaggccaatactttggttgttcctttgatctgaccaaagtgaaggattccagttttgaacaacacagtgtccaaataatggtcaaggataatgcaggaaaaattaaaccatccttcaatatagtgcctttaacttcccgtgtgaaacctgatcctccacatattaaaaacctctccttccacaatgatgacctatatgtgcaatgggagaatccacagaattttattagcagatgcctattttatgaagtagaagtcaataacagccaaactgagacacataatgttttctacgtccaagaggctaaatgtgagaatccagaatttgagagaaatgtggagaatacatcttgtttcatggtccctggtgttcttcctgatactttgaacacagtcagaataagagtcaaaacaaataagttatgctatgaggatgacaaactctggagtaattggagccaagaaatgagtataggtaagaagcgcaattccacactctacataaccatgttactcattgttccagtcatcgtcgcaggtgcaatcatagtactcctgctttacctaaaaaggctcaagattattatattccctccaattcctgatcctggcaagatttttaaagaaatgtttggagaccagaatgatgatactctgcactggaagaagtacgacatctatgagaagcaaaccaaggaggaaaccgactctgtagtgctgatagaaaacctgaagaaagcctctcagtgatggagataatttatttttaccttcactgtgaccttgagaagattcttcccattctccatttgttatctgggaacttattaaatggaaactgaaactactgcaccatttaaaaacaggcagctcataagagccacaggtctttatgttgagtcgcgcaccgaaaaactaaaaataatgggcgctttggagaagagtgtggagtcattctcattgaattataaaagccagcaggcttcaaactaggggacaaagcaaaaagtgatgatagtggtggagttaatcttatcaagagttgtgacaacttcctgagggatctatacttgctttgtgttctttgtgtcaacatgaacaaattttatttgtaggggaactcatttggggtgcaaatgctaatgtcaaacttgagtcacaaagaacatgtagaaaacaaaatggataaaatctgatatgtattgtttgggatcctattgaaccatgtttgtggctattaaaactcttttaacagtc

SEQ ID NO: 30328 - protein, 427 aa, Homo sapiens; identical to SEQ ID NO: 4237

SEQ ID NO: 30329 - DNA, 4033 bp, Homo sapiens
agagggagcgaaggaggcggggactgccaaggctccagcccggccgggctccgaggcgagaggctgcatggagtggccggcgcggctctgcgggctgtgggcgctgctgctctgcgccggcggcgggggcgggggcgggggcgccgcgcctacggaaactcagccacctgtgacaaatttgagtgtctctgttgaaaacctctgcacagtaatatggacatggaatccacccgagggagccagctcaaattgtagtctatggtattttagtcattttggcgacaaacaagataagaaaatagctccggaaactcgtcgttcaatagaagtacccctgaatgagaggatttgtctgcaagtggggtcccagtgtagcaccaatgagagtgagaagcctagcattttggttgaaaaatgcatctcacccccagaaggtgatcctgagtctgctgtgactgagcttcaatgcatttggcacaacctgagctacatgaagtgttcttggctccctggaaggaataccagtcccgacactaactatactctctactattggcacagaagcctggaaaaaattcatcaatgtgaaaacatctttagagaaggccaatactttggttgttcctttgatctgaccaaagtgaaggattccagttttgaacaacacagtgtccaaataatggtcaaggataatgcaggaaaaattaaaccatccttcaatatagtgcctttaacttcccgtgtgaaacctgatcctccacatattaaaaacctctccttccacaatgatgacctatatgtgcaatgggagaatccacagaattttattagcagatgcctattttatgaagtagaagtcaataacagccaaactgagacacataatgttttctacgtccaagaggctaaatgtgagaatccagaatttgagagaaatgtggagaatacatcttgtttcatggtccctggtgttcttcctgatactttgaacacagtcagaataagagtcaaaacaaataagttatgctatgaggatgacaaactctggagtaattggagccaagaaatgagtataggtaagaagcgcaattccacactctacataaccatgttactcattgttccagtcatcgtcgcaggtgcaatcatagtactcctgctttacctaaaaaggctcaagattattatattccctccaattcctgatcctggcaagatttttaaagaaatgtttggagaccagaatgatgatactctgcactggaagaagtacgacatctatgagaagcaaaccaaggaggaaaccgactctgtagtgctgatagaaaacctgaagaaagcctctcagtgatggagataatttatttttaccttcactgtgaccttgagaagattcttcccattctccatttgttatctgggaacttattaaatggaaactgaaactactgcaccatttaaaaacaggcagctcataagagccacaggtctttatgttgagtcgcgcaccgaaaaactaaaaataatgggcgctttggagaagagtgtggagtcattctcattgaattataaaagccagcaggcttcaaactaggggacaaagcaaaaagtgatgatagtggtggagttaatcttatcaagagttgtgacaacttcctgagggatctatacttgctttgtgttctttgtgtcaacatgaacaaattttatttgtaggggaactcatttggggtgcaaatgctaatgtcaaacttgagtcacaaagaacatgtagaaaacaaaatggataaaatctgatatgtattgtttgggatcctattgaaccatgtttgtggctattaaaactcttttaacagtctgggctgggtccggtggctcacgcctgtaatcccagcaatttgggagtccgaggcgggcggatcactcgaggtcaggagttccagaccagcctgaccaaaatggtgaaacctcctctctactaaaactacaaaaattaactgggtgtggtggcgcgtgcctgtaatcccagctactcgggaagctgaggcaggtgaattgtttgaacctgggaggtggaggttgcagtgagcagagatcacaccactgcactctagcctgggtgacagagcaagactctgtctaaaaaacaaaacaaaacaaaacaaaacaaaaaaacctcttaatattctggagtcatcattcccttcgacagcattttcctctgctttgaaagccccagaaatcagtgttggccatgatgacaactacagaaaaaccagaggcagcttctttgccaagacctttcaaagccattttaggctgttaggggcagtggaggtagaatgactccttgggtattagagtttcaaccatgaagtctctaacaatgtattttcttcacctctgctactcaagtagcatttactgtgtctttggtttgtgctaggcccccgggtgtgaagcacagaccccttccaggggtttacagtctatttgagactcctcagttcttgccacttttttttttaatctccaccagtcatttttcagaccttttaactcctcaattccaacactgatttccccttttgcattctccctccttcccttccttgtagccttttgactttcattggaaattaggatgtaaatctgctcaggagacctggaggagcagaggataattagcatctcaggttaagtgtgagtaatctgagaaacaatgactaattcttgcatattttgtaacttccatgtgagggttttcagcattgatatttgtgcattttctaaacagagatgaggtggtatcttcacgtagaacattggtattcgcttgagaaaaaaagaatagttgaacctatttctctttctttacaagatgggtccaggattcctcttttctctgccataaatgattaattaaatagcttttgtgtcttacattggtagccagccagccaaggctctgtttatgcttttggggggcatatattgggttccattctcacctatccacacaacatatccgtatatatcccctctactcttacttcccccaaatttaaagaagtatgggaaatgagaggcatttcccccaccccatttctctcctcacacacagactcatattactggtaggaacttgagaactttatttccaagttgttcaaacatttaccaatcatattaatacaatgatgctatttgcaattcctgctcctaggggaggggagataagaaaccctcactctctacaggtttgggtacaagtggcaacctgcttccatggccgtgtagaagcatggtgccctggcttctctgaggaagctggggttcatgacaatggcagatgtaaagttattcttgaagtcagattgaggctgggagacagccgtagtagatgttctactttgttctgctgttctctagaaagaatatttggttttcctgtataggaatgagattaattcctttccaggtattttataattctgggaagcaaaacccatgcctccccctagccatttttactgttatcctatttagatggccatgaagaggatgctgtgaaattcccaacaaacattgatgctgacagtcatgcagtctgggagtggggaagtgatcttttgttcccatcctcttcttttagcagtaaaatagctgagggaaaagggagggaaaaggaagttatgggaatacctgtggtggttgtgatccctaggtcttgggagctcttggaggtgtctgtatcagtggatttcccatcccctgtgggaaattagtaggctcatttactgttttaggtctagcctatgtggattttttcctaacatacctaagcaaacccagtgtcaggatggtaattcttattctttcgttcagttaagtttttcccttcatctgggcactgaagggatatgtgaaacaatgttaacatttttggtagtcttcaaccagggattgtttctgtttaacttcttataggaaagcttgagtaaaataaatattgtctttttgtatgtcaccc

SEQ ID NO: 30330 - protein, 427 aa, Homo sapiens; identical to SEQ ID NO: 4237

SEQ ID NO: 30331 - DNA, 4709 bp, Homo sapiens
agagggagcgaaggaggcggggactgccaaggctccagcccggccgggctccgaggcgagaggctgcatggagtggccggcgcggctctgcgggctgtgggcgctgctgctctgcgccggcggcgggggcgggggcgggggcgccgcgcctacggaaactcagccacctgtgacaaatttgagtgtctctgttgaaaacctctgcacagtaatatggacatggaatccacccgagggagccagctcaaattgtagtctatggtattttagtcattttggcgacaaacaagataagaaaatagctccggaaactcgtcgttcaatagaagtacccctgaatgagaggatttgtctgcaagtggggtcccagtgtagcaccaatgagagtgagaagcctagcattttggttgaaaaatgcatctcacccccagaaggtgatcctgagtctgctgtgactgagcttcaatgcatttggcacaacctgagctacatgaagtgttcttggctccctggaaggaataccagtcccgacactaactatactctctactattggcacagaagcctggaaaaaattcatcaatgtgaaaacatctttagagaaggccaatactttggttgttcctttgatctgaccaaagtgaaggattccagttttgaacaacacagtgtccaaataatggtcaaggataatgcaggaaaaattaaaccatccttcaatatagtgcctttaacttcccgtgtgaaacctgatcctccacatattaaaaacctctccttccacaatgatgacctatatgtgcaatgggagaatccacagaattttattagcagatgcctattttatgaagtagaagtcaataacagccaaactgagacacataatgttttctacgtccaagaggctaaatgtgagaatccagaatttgagagaaatgtggagaatacatcttgtttcatggtccctggtgttcttcctgatactttgaacacagtcagaataagagtcaaaacaaataagttatgctatgaggatgacaaactctggagtaattggagccaagaaatgagtataggtaagaagcgcaattccacactctacataaccatgttactcattgttccagtcatcgtcgcaggtgcaatcatagtactcctgctttacctaaaaaggctcaagattattatattccctccaattcctgatcctggcaagatttttaaagaaatgtttggagaccagaatgatgatactctgcactggaagaagtacgacatctatgagaagcaaaccaaggaggaaaccgactctgtagtgctgatagaaaacctgaagaaagcctctcagtgatggagataatttatttttaccttcactgtgaccttgagaagattcttcccattctccatttgttatctgggaacttattaaatggaaactgaaactactgcaccatttaaaaacaggcagctcataagagccacaggtctttatgttgagtcgcgcaccgaaaaactaaaaataatgggcgctttggagaagagtgtggagtcattctcattgaattataaaagccagcaggcttcaaactaggggacaaagcaaaaagtgatgatagtggtggagttaatcttatcaagagttgtgacaacttcctgagggatctatacttgctttgtgttctttgtgtcaacatgaacaaattttatttgtaggggaactcatttggggtgcaaatgctaatgtcaaacttgagtcacaaagaacatgtagaaaacaaaatggataaaatctgatatgtattgtttgggatcctattgaaccatgtttgtggctattaaaactcttttaacagtctgggctgggtccggtggctcacgcctgtaatcccagcaatttgggagtccgaggcgggcggatcactcgaggtcaggagttccagaccagcctgaccaaaatggtgaaacctcctctctactaaaactacaaaaattaactgggtgtggtggcgcgtgcctgtaatcccagctactcgggaagctgaggcaggtgaattgtttgaacctgggaggtggaggttgcagtgagcagagatcacaccactgcactctagcctgggtgacagagcaagactctgtctaaaaaacaaaacaaaacaaaacaaaacaaaaaaacctcttaatattctggagtcatcattcccttcgacagcattttcctctgctttgaaagccccagaaatcagtgttggccatgatgacaactacagaaaaaccagaggcagcttctttgccaagacctttcaaagccattttaggctgttaggggcagtggaggtagaatgactccttgggtattagagtttcaaccatgaagtctctaacaatgtattttcttcacctctgctactcaagtagcatttactgtgtctttggtttgtgctaggcccccgggtgtgaagcacagaccccttccaggggtttacagtctatttgagactcctcagttcttgccacttttttttttaatctccaccagtcatttttcagaccttttaactcctcaattccaacactgatttccccttttgcattctccctccttcccttccttgtagccttttgactttcattggaaattaggatgtaaatctgctcaggagacctggaggagcagaggataattagcatctcaggttaagtgtgagtaatctgagaaacaatgactaattcttgcatattttgtaacttccatgtgagggttttcagcattgatatttgtgcattttctaaacagagatgaggtggtatcttcacgtagaacattggtattcgcttgagaaaaaaagaatagttgaacctatttctctttctttacaagatgggtccaggattcctcttttctctgccataaatgattaattaaatagcttttgtgtcttacattggtagccagccagccaaggctctgtttatgcttttggggggcatatattgggttccattctcacctatccacacaacatatccgtatatatcccctctactcttacttcccccaaatttaaagaagtatgggaaatgagaggcatttcccccaccccatttctctcctcacacacagactcatattactggtaggaacttgagaactttatttccaagttgttcaaacatttaccaatcatattaatacaatgatgctatttgcaattcctgctcctaggggaggggagataagaaaccctcactctctacaggtttgggtacaagtggcaacctgcttccatggccgtgtagaagcatggtgccctggcttctctgaggaagctggggttcatgacaatggcagatgtaaagttattcttgaagtcagattgaggctgggagacagccgtagtagatgttctactttgttctgctgttctctagaaagaatatttggttttcctgtataggaatgagattaattcctttccaggtattttataattctgggaagcaaaacccatgcctccccctagccatttttactgttatcctatttagatggccatgaagaggatgctgtgaaattcccaacaaacattgatgctgacagtcatgcagtctgggagtggggaagtgatcttttgttcccatcctcttcttttagcagtaaaatagctgagggaaaagggagggaaaaggaagttatgggaatacctgtggtggttgtgatccctaggtcttgggagctcttggaggtgtctgtatcagtggatttcccatcccctgtgggaaattagtaggctcatttactgttttaggtctagcctatgtggattttttcctaacatacctaagcaaacccagtgtcaggatggtaattcttattctttcgttcagttaagtttttcccttcatctgggcactgaagggatatgtgaaacaatgttaacatttttggtagtcttcaaccagggattgtttctgtttaacttcttataggaaagcttgagtaaaataaatattgtctttttgtatgtcacccaaatgttttcctttggtcttattttggggaaatggtgggaggtagagaaaattggagttaaaagaagaaacattatgaaaaaattccaagccagctattttatcttataatcattcatcatgagtttctttgatgttctggctgttccggtgtgcctatgttttctgataagggcataaatacacttagtttaatattaatttagcctttgtaagcagcacttgaagggacttaagtattcaataaattgtagttatgataattaatggaaatggagggttggtcctttctaatattaagctaaagtggaatgcaatatgattaatgatatacatgatgtgcaatgtctagtcacaagggaatatattagcaggttagattagagaccaagaaagtcagtttttgactggacgcagtggctcacgcctgtaatcccagcactttggaaggctgaagcgggctgatcatgaggtcaggagatccagaccatcctggctaacacggtgaaaccccagctgtactaaaaatacaaaaaaattagctgggtgtagtggcgggcgactgtggtcccagctactcaggaggctgaggcaggagaatggcgtgaacccgggaggtggagcttgcagcatgccactgcactccagcctgggcaacagagcgagactccgtctca

SEQ ID NO: 30332 - protein, 427 aa, Homo sapiens; identical to SEQ ID NO: 4237

SEQ ID NO: 30333 - DNA, 1797 bp, Homo sapiens
gtatttaaaactagttaagatcttctgatttacctgagcgggtggggaaacccaccccatgagcatcccctgggctcacccagtgcacagagggaggcctcccgtggctgggcccctctcagtcagcccatgtggctgccatgacctggagcaccacagccgggggcgcccaccagctcaacaccaccacattcacgtggcagcacctccctgcctggcaaccgctgctgttggccagcattaggctgcagctcttcttctacgtgggcctggccttcatcagcctggacctctattactcctccaccagcatcaaggagctggagtacaactacaccggcgacccgggcaccagcaactgctcggtgtgtgctgtggctggccagggctgtgtgccactgcccatctgctcatgcgcctggtacttctcactgcctgagctcttccagggccctgtgtacccctactacgtgctgaccaacttctaccaaaacaaccggcggtatggagtgtccgcgacaacgcgcagctgagcgggctgcccagcacgctgcaccatccagtcaatgagtgcacccactgcgccgcctgcccatcgtgcaccctgcaatgtcatcaccaacagcctcttcaacgactcctcgctgtggcaccagtgctggcccggcgagccctacgtggaggtgccgcgctaccgcactgcacctgcatcacccggtagaccaactaccccatcaagttctgcaacccaccactggtcaacggcagcctggcactggccttccatggcacagcacccctgcccaactggcgctggctggtctacgacaagctcagccccatccccaacaacaacggcttcatcaaccaggacttcgtggtgtggatgcgcatggcagcgctgcccacgttccgcaagctgttccgcaagctgtacgggcacatccgccagggcaactactcagctgggctgccgcggtgtgtctactgtgtcaacatcacctacaactacctggtaagaagcgcaattccacactctacataaccatgttactcattgttccagtcatcgtcgcaggtgcaatcatagtactcctgctttacctaaaaaggctcaagattattatattccctccaattcctgatcctggcaagatttttaaagaaatgtttggagaccagaatgatgatactctgcactggaagaagtacgacatctatgagaagcaaaccaaggaggaaaccgactctgtagtgctgatagaaaacctgaagaaagcctctcagtgatggagataatttatttttaccttcactgtgaccttgagaagattcttcccattctccatttgttatctgggaacttattaaatggaaactgaaactactgcaccatttaaaaacaggcagctcataagagccacaggtctttatgttgagtcgcgcaccgaaaaactaaaaataatgggcgctttggagaagagtgtggagtcattctcattgaattataaaagccagcaggcttcaaactaggggacaaagcaaaaagtgatgatagtggtggagttaatcttatcaagagttgtgacaacttcctgagggatctatacttgctttgtgttctttgtgtcaacatgaacaaattttatttgtaggggaactcatttggggtgcaaatgctaatgtcaaacttgagtcacaaagaacatgtagaaaacaaaatggataaaatctgatatgtattgtttgggatcctattgaaccatgtttgtggctattaaaactcttttaacagtc

SEQ ID NO: 30334 - protein, 226 aa, Homo sapiens
MSSPTASSTTPRCGTSAGPASPTWRCRATALHLHHPVDQLPHQVLQPTTGQRQPGTGLPWHSTPAQLALAGLRQAQPHPQQQRLHQPGLRGVDAHGSAAHVPQAVPQAVRAHPPGQLLSWAAAVCLLCQHHLQLPGKKRNSTLYITMLLIVPVIVAGAIIVLLLYLKRLKIIIFPPIPDPGKIFKEMFGDQNDDTLHWKKYDIYEKQTKEETDSVVLIENLKKASQ

SEQ ID NO: 30335 - DNA, 3972 bp, Homo sapiens
gtatttaaaactagttaagatcttctgatttacctgagcgggtggggaaacccaccccatgagcatcccctgggctcacccagtgcacagagggaggcctcccgtggctgggcccctctcagtcagcccatgtggctgccatgacctggagcaccacagccgggggcgcccaccagctcaacaccaccacattcacgtggcagcacctccctgcctggcaaccgctgctgttggccagcattaggctgcagctcttcttctacgtgggcctggccttcatcagcctggacctctattactcctccaccagcatcaaggagctggagtacaactacaccggcgacccgggcaccagcaactgctcggtgtgtgctgtggctggccagggctgtgtgccactgcccatctgctcatgcgcctggtacttctcactgcctgagctcttccagggccctgtgtacccctactacgtgctgaccaacttctaccaaaacaaccggcggtatggagtgtccgcgacaacgcgcagctgagcgggctgcccagcacgctgcaccatccagtcaatgagtgcacccactgcgccgcctgcccatcgtgcaccctgcaatgtcatcaccaacagcctcttcaacgactcctcgctgtggcaccagtgctggcccggcgagccctacgtggaggtgccgcgctaccgcactgcacctgcatcacccggtagaccaactaccccatcaagttctgcaacccaccactggtcaacggcagcctggcactggccttccatggcacagcacccctgcccaactggcgctggctggtctacgacaagctcagccccatccccaacaacaacggcttcatcaaccaggacttcgtggtgtggatgcgcatggcagcgctgcccacgttccgcaagctgttccgcaagctgtacgggcacatccgccagggcaactactcagctgggctgccgcggtgtgtctactgtgtcaacatcacctacaactacctggtaagaagcgcaattccacactctacataaccatgttactcattgttccagtcatcgtcgcaggtgcaatcatagtactcctgctttacctaaaaaggctcaagattattatattccctccaattcctgatcctggcaagatttttaaagaaatgtttggagaccagaatgatgatactctgcactggaagaagtacgacatctatgagaagcaaaccaaggaggaaaccgactctgtagtgctgatagaaaacctgaagaaagcctctcagtgatggagataatttatttttaccttcactgtgaccttgagaagattcttcccattctccatttgttatctgggaacttattaaatggaaactgaaactactgcaccatttaaaaacaggcagctcataagagccacaggtctttatgttgagtcgcgcaccgaaaaactaaaaataatgggcgctttggagaagagtgtggagtcattctcattgaattataaaagccagcaggcttcaaactaggggacaaagcaaaaagtgatgatagtggtggagttaatcttatcaagagttgtgacaacttcctgagggatctatacttgctttgtgttctttgtgtcaacatgaacaaattttatttgtaggggaactcatttggggtgcaaatgctaatgtcaaacttgagtcacaaagaacatgtagaaaacaaaatggataaaatctgatatgtattgtttgggatcctattgaaccatgtttgtggctattaaaactcttttaacagtctgggctgggtccggtggctcacgcctgtaatcccagcaatttgggagtccgaggcgggcggatcactcgaggtcaggagttccagaccagcctgaccaaaatggtgaaacctcctctctactaaaactacaaaaattaactgggtgtggtggcgcgtgcctgtaatcccagctactcgggaagctgaggcaggtgaattgtttgaacctgggaggtggaggttgcagtgagcagagatcacaccactgcactctagcctgggtgacagagcaagactctgtctaaaaaacaaaacaaaacaaaacaaaacaaaaaaacctcttaatattctggagtcatcattcccttcgacagcattttcctctgctttgaaagccccagaaatcagtgttggccatgatgacaactacagaaaaaccagaggcagcttctttgccaagacctttcaaagccattttaggctgttaggggcagtggaggtagaatgactccttgggtattagagtttcaaccatgaagtctctaacaatgtattttcttcacctctgctactcaagtagcatttactgtgtctttggtttgtgctaggcccccgggtgtgaagcacagaccccttccaggggtttacagtctatttgagactcctcagttcttgccacttttttttttaatctccaccagtcatttttcagaccttttaactcctcaattccaacactgatttccccttttgcattctccctccttcccttccttgtagccttttgactttcattggaaattaggatgtaaatctgctcaggagacctggaggagcagaggataattagcatctcaggttaagtgtgagtaatctgagaaacaatgactaattcttgcatattttgtaacttccatgtgagggttttcagcattgatatttgtgcattttctaaacagagatgaggtggtatcttcacgtagaacattggtattcgcttgagaaaaaaagaatagttgaacctatttctctttctttacaagatgggtccaggattcctcttttctctgccataaatgattaattaaatagcttttgtgtcttacattggtagccagccagccaaggctctgtttatgcttttggggggcatatattgggttccattctcacctatccacacaacatatccgtatatatcccctctactcttacttcccccaaatttaaagaagtatgggaaatgagaggcatttcccccaccccatttctctcctcacacacagactcatattactggtaggaacttgagaactttatttccaagttgttcaaacatttaccaatcatattaatacaatgatgctatttgcaattcctgctcctaggggaggggagataagaaaccctcactctctacaggtttgggtacaagtggcaacctgcttccatggccgtgtagaagcatggtgccctggcttctctgaggaagctggggttcatgacaatggcagatgtaaagttattcttgaagtcagattgaggctgggagacagccgtagtagatgttctactttgttctgctgttctctagaaagaatatttggttttcctgtataggaatgagattaattcctttccaggtattttataattctgggaagcaaaacccatgcctccccctagccatttttactgttatcctatttagatggccatgaagaggatgctgtgaaattcccaacaaacattgatgctgacagtcatgcagtctgggagtggggaagtgatcttttgttcccatcctcttcttttagcagtaaaatagctgagggaaaagggagggaaaaggaagttatgggaatacctgtggtggttgtgatccctaggtcttgggagctcttggaggtgtctgtatcagtggatttcccatcccctgtgggaaattagtaggctcatttactgttttaggtctagcctatgtggattttttcctaacatacctaagcaaacccagtgtcaggatggtaattcttattctttcgttcagttaagtttttcccttcatctgggcactgaagggatatgtgaaacaatgttaacatttttggtagtcttcaaccagggattgtttctgtttaacttcttataggaaagcttgagtaaaataaatattgtctttttgtatgtcaccc

SEQ ID NO: 30336 - protein, 226 aa, Homo sapiens; identical to SEQ ID NO: 30334

SEQ ID NO: 30337 - DNA, 4648 bp, Homo sapiens
gtatttaaaactagttaagatcttctgatttacctgagcgggtggggaaacccaccccatgagcatcccctgggctcacccagtgcacagagggaggcctcccgtggctgggcccctctcagtcagcccatgtggctgccatgacctggagcaccacagccgggggcgcccaccagctcaacaccaccacattcacgtggcagcacctccctgcctggcaaccgctgctgttggccagcattaggctgcagctcttcttctacgtgggcctggccttcatcagcctggacctctattactcctccaccagcatcaaggagctggagtacaactacaccggcgacccgggcaccagcaactgctcggtgtgtgctgtggctggccagggctgtgtgccactgcccatctgctcatgcgcctggtacttctcactgcctgagctcttccagggccctgtgtacccctactacgtgctgaccaacttctaccaaaacaaccggcggtatggagtgtccgcgacaacgcgcagctgagcgggctgcccagcacgctgcaccatccagtcaatgagtgcacccactgcgccgcctgcccatcgtgcaccctgcaatgtcatcaccaacagcctcttcaacgactcctcgctgtggcaccagtgctggcccggcgagccctacgtggaggtgccgcgctaccgcactgcacctgcatcacccggtagaccaactaccccatcaagttctgcaacccaccactggtcaacggcagcctggcactggccttccatggcacagcacccctgcccaactggcgctggctggtctacgacaagctcagccccatccccaacaacaacggcttcatcaaccaggacttcgtggtgtggatgcgcatggcagcgctgcccacgttccgcaagctgttccgcaagctgtacgggcacatccgccagggcaactactcagctgggctgccgcggtgtgtctactgtgtcaacatcacctacaactacctggtaagaagcgcaattccacactctacataaccatgttactcattgttccagtcatcgtcgcaggtgcaatcatagtactcctgctttacctaaaaaggctcaagattattatattccctccaattcctgatcctggcaagatttttaaagaaatgtttggagaccagaatgatgatactctgcactggaagaagtacgacatctatgagaagcaaaccaaggaggaaaccgactctgtagtgctgatagaaaacctgaagaaagcctctcagtgatggagataatttatttttaccttcactgtgaccttgagaagattcttcccattctccatttgttatctgggaacttattaaatggaaactgaaactactgcaccatttaaaaacaggcagctcataagagccacaggtctttatgttgagtcgcgcaccgaaaaactaaaaataatgggcgctttggagaagagtgtggagtcattctcattgaattataaaagccagcaggcttcaaactaggggacaaagcaaaaagtgatgatagtggtggagttaatcttatcaagagttgtgacaacttcctgagggatctatacttgctttgtgttctttgtgtcaacatgaacaaattttatttgtaggggaactcatttggggtgcaaatgctaatgtcaaacttgagtcacaaagaacatgtagaaaacaaaatggataaaatctgatatgtattgtttgggatcctattgaaccatgtttgtggctattaaaactcttttaacagtctgggctgggtccggtggctcacgcctgtaatcccagcaatttgggagtccgaggcgggcggatcactcgaggtcaggagttccagaccagcctgaccaaaatggtgaaacctcctctctactaaaactacaaaaattaactgggtgtggtggcgcgtgcctgtaatcccagctactcgggaagctgaggcaggtgaattgtttgaacctgggaggtggaggttgcagtgagcagagatcacaccactgcactctagcctgggtgacagagcaagactctgtctaaaaaacaaaacaaaacaaaacaaaacaaaaaaacctcttaatattctggagtcatcattcccttcgacagcattttcctctgctttgaaagccccagaaatcagtgttggccatgatgacaactacagaaaaaccagaggcagcttctttgccaagacctttcaaagccattttaggctgttaggggcagtggaggtagaatgactccttgggtattagagtttcaaccatgaagtctctaacaatgtattttcttcacctctgctactcaagtagcatttactgtgtctttggtttgtgctaggcccccgggtgtgaagcacagaccccttccaggggtttacagtctatttgagactcctcagttcttgccacttttttttttaatctccaccagtcatttttcagaccttttaactcctcaattccaacactgatttccccttttgcattctccctccttcccttccttgtagccttttgactttcattggaaattaggatgtaaatctgctcaggagacctggaggagcagaggataattagcatctcaggttaagtgtgagtaatctgagaaacaatgactaattcttgcatattttgtaacttccatgtgagggttttcagcattgatatttgtgcattttctaaacagagatgaggtggtatcttcacgtagaacattggtattcgcttgagaaaaaaagaatagttgaacctatttctctttctttacaagatgggtccaggattcctcttttctctgccataaatgattaattaaatagcttttgtgtcttacattggtagccagccagccaaggctctgtttatgcttttggggggcatatattgggttccattctcacctatccacacaacatatccgtatatatcccctctactcttacttcccccaaatttaaagaagtatgggaaatgagaggcatttcccccaccccatttctctcctcacacacagactcatattactggtaggaacttgagaactttatttccaagttgttcaaacatttaccaatcatattaatacaatgatgctatttgcaattcctgctcctaggggaggggagataagaaaccctcactctctacaggtttgggtacaagtggcaacctgcttccatggccgtgtagaagcatggtgccctggcttctctgaggaagctggggttcatgacaatggcagatgtaaagttattcttgaagtcagattgaggctgggagacagccgtagtagatgttctactttgttctgctgttctctagaaagaatatttggttttcctgtataggaatgagattaattcctttccaggtattttataattctgggaagcaaaacccatgcctccccctagccatttttactgttatcctatttagatggccatgaagaggatgctgtgaaattcccaacaaacattgatgctgacagtcatgcagtctgggagtggggaagtgatcttttgttcccatcctcttcttttagcagtaaaatagctgagggaaaagggagggaaaaggaagttatgggaatacctgtggtggttgtgatccctaggtcttgggagctcttggaggtgtctgtatcagtggatttcccatcccctgtgggaaattagtaggctcatttactgttttaggtctagcctatgtggattttttcctaacatacctaagcaaacccagtgtcaggatggtaattcttattctttcgttcagttaagtttttcccttcatctgggcactgaagggatatgtgaaacaatgttaacatttttggtagtcttcaaccagggattgtttctgtttaacttcttataggaaagcttgagtaaaataaatattgtctttttgtatgtcacccaaatgttttcctttggtcttattttggggaaatggtgggaggtagagaaaattggagttaaaagaagaaacattatgaaaaaattccaagccagctattttatcttataatcattcatcatgagtttctttgatgttctggctgttccggtgtgcctatgttttctgataagggcataaatacacttagtttaatattaatttagcctttgtaagcagcacttgaagggacttaagtattcaataaattgtagttatgataattaatggaaatggagggttggtcctttctaatattaagctaaagtggaatgcaatatgattaatgatatacatgatgtgcaatgtctagtcacaagggaatatattagcaggttagattagagaccaagaaagtcagtttttgactggacgcagtggctcacgcctgtaatcccagcactttggaaggctgaagcgggctgatcatgaggtcaggagatccagaccatcctggctaacacggtgaaaccccagctgtactaaaaatacaaaaaaattagctgggtgtagtggcgggcgactgtggtcccagctactcaggaggctgaggcaggagaatggcgtgaacccgggaggtggagcttgcagcatgccactgcactccagcctgggcaacagagcgagactccgtctca

SEQ ID NO: 30338 - protein, 226 aa, Homo sapiens; identical to SEQ ID NO: 30334

SEQ ID NO: 30339 - DNA, 2243 bp, Homo sapiens
agctggcagaggataaaagccgccgcggctgccttaggaacggcgctgcctcgtctctgctacccctggttgggcggccctgcgaagcagctccttcgggcagccccgggtcgcttagcggccaaggaggcttcagttctttgccgcctgcaaggcggagaccagaaggcggaatccacagctggcgacgcgggagcatctgctgtccaccagcggagcacaggccatcaaagccgcatctgaacttgaattctgtgcagctgattgcagagctggacccggatctgcgaccccctgtggacagaggttgaccgtaccccggagaggagctttctcacggagggcactggttgcagaggctggaagtgaaataaagacgcgctcttgtttcagagttcgtcccctgctgagataggaaggcagagccacctcctctcctctcccacctgcagattaagcttttctaaaaagcctaggcatcttcttatattcagataccctatcgtcgtcagtcatggctagcatcattgcacgtgtcggtaacagccggcggctgaatgcacccttgccgccttgggcccattccatgctgaggtccctggggagaagtctcggtcctataatggccagcatggcagacagaaacatgaagttgttctcggggagggtggtgccagcccaaggggaagaaacctttgaaaactggctgacccaagtcaatggcgtcctgccagattggaatatgtctgaggaggaaaagctcaagcgcttgatgaaaacccttaggggccctgcccgcgaggtcatgcgtgtgcttcaggcgaccaaccctaacctaagtgtggcagatttcttgcgagccatgaaattggtgtttggggagtctgaaagcagtgtgactgcccatggtaaattttttaacaccctacaagctcaaggggagaaagcctccctttatgtgatccgtttagaggtgcagctccagaacgctattcaggcaggcattatagctgagaaagatgcaaaccggactcgcttgcagcagctccttttaggcggtgagctgagtagggacctccgactcagacttaaggattttctcaggatgtatgcaaatgagcaggagcggcttcccaactttctggagttaatcagaatggtaagggaggaagaggattgggatgatgcttttattaaacggaagcgtccaaaaaggtctgagtcaatggtggagagggcagtcagccctgtggcatttcagggctccccaccgatagtgatcggcagtgctgactgcaatgtgatagagatagatgataccctcgacgactccgatgaggatgtgatcctggtggagtctcaggaccctccacttccatcctggggtgcccctcccctcagagacagggccagacctcaggatgaagtgctggtcattgattccccccacaattccagggctcagtttccttccaccagtggtggttctggctataagaataacggtcctggggagatgcgtagagccaggaagcgaaaacacacaatccgctgttcgtattgtggtgaggaaggccactcaaaagaaacctgtgacaacgagagtgacaaggcccaggtttttgagaatttgatcatcactctccaggagctgacccatactgagatggagaggtcaagagtggcccctggcgaatacaatgacttctctgagccactgtaagggaccacccccaggtttcagtgaacccttacctatattcagcatccagtagtgggaaaactggggtgggggtgggggtgggacttctaactgcatgaattaatccacaaagcggctatcttttggggtggagtagaaagggtcttggataccagcacattggagggagatagcctgacctctgtccttgctccttctccctgcagcctacgggtctgttttctgtgtgtgcccatttccttgacagctttattctttgtgaaagtggtataatttattgttaaatatttgaacaataaaaaaggtacaaaaagtgaagtacaaattacccaaatctctccacccttatataatcattgtcaaccctttgatgagtgatatttccctatacctatgtacccagatagatatatgcatagataaaagtgatgaaatataagtgctgttctatctgtattttttcaccaaacaatatatgttgtgagcttctatgtcaataaatatatatatcagcatctgc

SEQ ID NO: 30340 - protein, 402 aa, Homo sapiens; identical to SEQ ID NO: 4239

SEQ ID NO: 30341 - DNA, 2511 bp, Homo sapiens
atgggaatcggaaagccaggaagccctgcactctatgtgagcagagccaagggcatccataggagagggagagaaaagagggaccacctcctcatctcatcctggagggcgatagaagaggactcgcgtgtgacctcaggccccaaaggtccctatgtttcttggggcgccagaagcaatggtgcatcccgaaagggacggcggccacgtgacaggggggtcacgcgcagggtcgtaggggaccgcctggggatccccggacggctgcgaggaatgagcggttggctcgggctggtttcctccctccaccgcctgcttgtttcgccatgcccgggccggacggtggggctgcagcggcgaaagcgactgaagtccgggagcagtcgcatgagcttcccggtcaccaggaggccccgggaacagacacctcaccctgacattgtggcaggaacttctggattgctttccaaagtggctgcactgttttctatccccactgggcaggaaaacatctaagaaaggaggctccccccttcccttgcagggttaccagcaattaaaaagaagtactagagaggcaaatatcggcagtatacatctaagcgctggtcggaaaagaaggaactcagcccaagaacttgcccaatctgatactggaggtgccactcaagaaccactccctccaagatgttttcctggatttcctcagcctaaagtaatccctctttttcctggctataccatctggaacagatgacttccaaggacaccgtagcaaagaaaaagagaactggaagcccatgtgccttaatcgcttcatcctagaggaggaggataaccagtggagccttttctggatttctcactagaagtaaagaccaaatttccagaaggaacctgagagataaaaagtggttggctgctcctgacctgactcatagtgtttaactgaaccataccactagtgtatactagtgtgtgtgtatgtacatgcatacacacatgcacacacacattcacacacaatcctatggtatttggtgactttggatgcccagctcttgcaacaatttcctgctgtcattcttttccctttgaatctcaggggtgagcaaactaaagaaatactatcatcttactgcttttagtatattccatagaaaaggagtggctggagtcagtgtagatcaacccaagcagtacaaatctgccagaattgcagctcagcttccttacctccagcatgtgtacctttctgaagggtaggcccttaagccagacataagtaagttatccactctgtgcataactgtctgacttggcttagaagcatgaaaggggcagaaatgtaagatgggtaaagaagggcttcatctgaaatagggccatgatgattagctctctctttccttcctttggcttcattgctgtattccatgtgggtcttgatatcttgaaactggatgagatacccaaatagtcagtccctgaatataaatcatttccttgtacagaatcactgccaaactcagtatggttaaaagatttttaacacccagctgcagcattcactctggttagaattggccatttaaatttatttcacatatgtaagtatcatatcctttataatgcattcttaattgttgctcagttcttccagattgaattcctttaaaaaattccttatgtaatcttttaattctagttggaaaacatcacttgacagttgctgtttatacaggcatgcctcgttttattgtgcctggctttattgtactttgcagatactgtgtttttcacaaatggaaggtttgtggcaaccctgcgttaagcaagtctgttggcaccattttctcgacagcatgtgctaactttgtctctgtctcacattttggtaattctctcaatgtttcaaactttttcattatgattacatctgttatgtggagctgtgatcagtgatctttgatgttaacattgtaattgttttggggtgccacaactgtgcccagataagacagtgaacttaattggtaaatgttttatgtgttcagactgttccactgactagcccttcttcaaactctctcactctccttgggcctccctattccctgaaatacaacaatattgatattaagccaattaataaccctacaatgatttccaagtgtttaagtgaaaggaaagacatgtatgtttcaccttaaatcaaaagctagaaatggccaggcgtggaggctcacgcctgtaatcccagcactttgggaggccaaggcgggcggatcacaaggtcaggagatcgagaccatcctggctaacacggtgaaaccctgtctctactaaaaaatacaaaaaattagccgggcgtagtggcaggcgcctgtagtcccagctacatgggaggctgaggcaggagaatggcgtgaacctgggaggcggagcttgcagtgagccgagatcgcgccactgcattccagcctgggtgacagagcgagactccatctc

SEQ ID NO: 30342 - protein, 171 aa, Homo sapiens [sequence omitted]

SEQ ID NO: 30343 - DNA, 2896 bp, Homo sapiens
attaggcggcgcggggcggccggcatggagctcccggaggcgcggcagggtcaggagctcggtggcatggcggcggtggctgccccgatttcctccagctgccactccttgcttcgtgtccccggtccctagacgcctcgtctcctcccgtgtccctcttcccatggagtcagtacggatcgaacagatgctgagcttgcccgctgaggtcagcagcgacaacttggagtcggcggagcgaggggcatcagcggcccaagtagacatgggcccccacccaaaggtggctgcagagggccccgcacctctaccgacgcgggagccagagcaagagcagtctccggggacctcaacgccggagagcaaagtcctgctcacgcaggcagacgccttggcgtcccgggggcgaatccgtgaagccctcgaggtgtatagacagctctccgagcggcagcagctggtggctgagcagctggagcagctggtgcgctgcctggcggagaaagtcccgcaaggcgaggcgctggcgccggcgcccccggacgagggtagcactgcaagcggcaccgtggcggcggaagagacgggggccgccgcggctgcggcggccaccgaggtgtgggacggctttaagtgccggaaatgtcatgggtttctatcagaccccgtgtccttgtcgtgtggccacaccttttgtaaactgtgcctggaacgtgggcgggccgccgaccggcgctgtgcgctgtgcggggtcaagctctccgccttgatggtggccactgggcgggcgcgtggagcccggcgggctgggcagcagccgccgccgccgctgcgagtcaacgtggtgctcagcggcctcctcggcaagttgtttccaggcccagcgcgagcgtcgcaactccggcacgagggcaaccgactgtaccgcgagcgccaggtggaggcggcactgctcaagtacaacgaggcagttaagttggctccaaatgaccacttgctttatagcaatcggtctcagatttatttcaccttggagtctcatgagaatgcactgcatgatgcagaaatagcatgtaagctccgcccgatgggttttaaggcacatttcagaaaagcccaagccttagccaccctaggcaaggtggaggaggcactaagggagtttctctactgtgtatcccttgatggaaagaacaagagagcaagatgtgaagcccaaagagacaatctggagctcccacattgttctagtcaggaggaagcagcagccaggggagatggcagcagtctgatggacccagctaaagtgaagggggatggtcagcagcaccacatgaaagaccaggaagaagaggaggagaagtgggatgctacctctccaaaagctgcttccagcaagactggaaaatgccaggaaaagaaaaggaaacattgccagattgaatcccaagaagaaacggggatgcctaataaagcctccaagcaagatcctcccactgatcagggggacaaacctgctctcagtttaccacttgcatctttcgacgcatctgaccttgaatgcgctctatgtatgagattattctatgagccagtcacaacaccttgcgggcatactttttgcttaaaatgcctagaaagatgcctagatcacaacgcaaagtgtccattgtgcaaagacggtctttcacagtgcttggcatcaagaaaatacagcaaaaatgtaataatggaggagctcatagctaaattccttccagaagaactgaaggaacgaaggaagctttatgaagaggaaatggaagaactttctaaccttaataagaatgtgcctattttcgtgtgtactatggcctatcccaccgttccttgtcccctgcacatctttgagccttgttaccgcctgatgattcgtagatgcattgagacaggcacgagacagtttggcatgtgccttggagatcctgtcaaagggcactgcctgttgtgtaattgaagctgtaacccagggacaggaaaataggcagaagtcccttgagccacagcatggggctacagaaatggctgggtgccagcccagggaaacagaactcatcaaggatctagtctctcgactccattctcaataaacaggtttgcagaatatggctgcatcctagagatcagaaatgttcaattctttgctgatggccgctcagtggttgacagcataggcaagaggcgcttcagggtgctccatcagagccagcgggatggctacaacacagccgacattgaatacattgaagaccaaaaggttcagggagaggattgtgctgagctcatgggattacataactgtgtctatcagcaagcatcattgtggtttcattcgctcaaattatccctaaagaatcggatactcaatcactttggtcccatgccggagaaagacgccgatcctcagatgaacccgaatggcccagcctggtgctggtggatgttagcagttcttcccttggaaagccgagctcagctccccttcctagcaatgaggtccttaaaggacagactgaatggtattcgacgagtcctggccttcatatcccgaaaccaaaactagtgagtggattgccgaagaggagctcccaccttccccactgccgtcggggggagtcttcttgtaaatatatctaattgcaataatatcttaacagaagggggtgtcaaacagaggcatcagcctgctgttgatcacagagagaaattgagtagaaagaccaaaagaatgtgacctatttgaaactttctgtcttaagatgcttcttgacatgctgcataactacataaacagcagaggtgtttaagagcccagaaaaacataatttgattttaacattaaaatttccaaaagttt

SEQ ID NO: 30344 - protein, 610 aa, Homo sapiens
MESVRIEQMLSLPAEVSSDNLESAERGASAAQVDMGPHPKVAAEGPAPLPTREPEQEQSPGTSTPESKVLLTQADALASRGRIREALEVYRQLSERQQLVAEQLEQLVRCLAEKVPQGEALAPAPPDEGSTASGTVAAEETGAAAAAAATEVWDGFKCRKCHGFLSDPVSLSCGHTFCKLCLERGRAADRRCALCGVKLSALMVATGRARGARRAGQQPPPPLRVNVVLSGLLGKLFPGPARASQLRHEGNRLYRERQVEAALLKYNEAVKLAPNDHLLYSNRSQIYFTLESHENALHDAEIACKLRPMGFKAHFRKAQALATLGKVEEALREFLYCVSLDGKNKRARCEAQRDNLELPHCSSQEEAAARGDGSSLMDPAKVKGDGQQHHMKDQEEEEEKWDATSPKAASSKTGKCQEKKRKHCQIESQEETGMPNKASKQDPPTDQGDKPALSLPLASFDASDLECALCMRLFYEPVTTPCGHTFCLKCLERCLDHNAKCPLCKDGLSQCLASRKYSKNVIMEELIAKFLPEELKERRKLYEEEMEELSNLNKNVPIFVCTMAYPTVPCPLHIFEPCYRLMIRRCIETGTRQFGMCLGDPVKGHCLLCN

SEQ ID NO: 30345 - DNA, 2614 bp, Homo sapiens
attaggcggcgcggggcggccggcatggagctcccggaggcgcggcagggtcaggagctcggtggcatggcggcggtggctgccccgatttcctccagctgccactccttgcttcgtgtccccggtccctagacgcctcgtctcctcccgtgtccctcttcccatggagtcagtacggatcgaacagatgctgagcttgcccgctgaggtcagcagcgacaacttggagtcggcggagcgaggggcatcagcggcccaagtagacatgggcccccacccaaaggtggctgcagagggccccgcacctctaccgacgcgggagccagagcaagagcagtctccggggacctcaacgccggagagcaaagtcctgctcacgcaggcagacgccttggcgtcccgggggcgaatccgtgaagccctcgaggtgtatagacagctctccgagcggcagcagctggtggctgagcagctggagcagctggtgcgctgcctggcggagaaagtcccgcaaggcgaggcgctggcgccggcgcccccggacgagggtagcactgcaagcggcaccgtggcggcggaagagacgggggccgccgcggctgcggcggccaccgaggtgtgggacggctttaagtgccggaaatgtcatgggtttctatcagaccccgtgtccttgtcgtgtggccacaccttttgtaaactgtgcctggaacgtgggcgggccgccgaccggcgctgtgcgctgtgcggggtcaagctctccgccttgatggtggccactgggcgggcgcgtggagcccggcgggctgggcagcagccgccgccgccgctgcgagtcaacgtggtgctcagcggcctcctcggcaagttgtttccaggcccagcgcgagcgtcgcaactccggcacgagggcaaccgactgtaccgcgagcgccaggtggaggcggcactgctcaagtacaacgaggcagttaagttggctccaaatgaccacttgctttatagcaatcggtctcagatttatttcaccttggagtctcatgagaatgcactgcatgatgcagaaatagcatgtaagctccgcccgatgggttttaaggacaatctggagctcccacattgttctagtcaggaggaagcagcagccaggggagatggcagcagtctgatggacccagctaaagtgaagggggatggtcagcagcaccacatgaaagaccaggaagaagaggaggagaagtgggatgctacctctccaaaagctgcttccagcaagactggaaaatgccaggaaaagaaaaggaaacattgccagattgaatcccaagaagaaacggggatgcctaataaagcctccaagcaagatcctcccactgatcagggggacaaacctgctctcagtttaccacttgcatctttcgacgcatctgaccttgaatgcgctctatgtatgagattattctatgagccagtcacaacaccttgcgggcatactttttgcttaaaatgcctagaaagatgcctagatcacaacgcaaagtgtccattgtgcaaagacggtctttcacagtgcttggcatcaagaaaatacagcaaaaatgtaataatggaggagctcatagctaaattccttccagaagaactgaaggaacgaaggaagctttatgaagaggaaatggaagaactttctaaccttaataagaatgtgcctattttcgtgtgtactatggcctatcccaccgttccttgtcccctgcacatctttgagccttgttaccgcctgatgattcgtagatgcattgagacaggcacgagacagtttggcatgtgccttggagatcctgtcaaagggtttgcagaatatggctgcatcctagagatcagaaatgttcaattctttgctgatggccgctcagtggttgacagcataggcaagaggcgcttcagggtgctccatcagagccagcgggatggctacaacacagccgacattgaatacattgaagaccaaaaggttcagggagaggattgtgctgagctcatgggattacataactgtgtctatcagcaagcatcattgtggtttcattcgctcaaattatccctaaagaatcggatactcaatcactttggtcccatgccggagaaagacgccgatcctcagatgaacccgaatggcccagcctggtgctggtggatgttagcagttcttcccttggaaagccgagctcagctccccttcctagcaatgaggtccttaaaggacagactgaatggtattcgacgagtcctggccttcatatcccgaaaccaaaactagtgagtggattgccgaagaggagctcccaccttccccactgccgtcggggggagtcttcttgtaaatatatctaattgcaataatatcttaacagaagggggtgtcaaacagaggcatcagcctgctgttgatcacagagagaaattgagtagaaagaccaaaagaatgtgacctatttgaaactttctgtcttaagatgcttcttgacatgctgcataactacataaacagcagaggtgtttaagagcccagaaaaacataatttgattttaacattaaaatttccaaaagttt

SEQ ID NO: 30346 - protein, 718 aa, Homo sapiens; identical to SEQ ID NO: 4245

SEQ ID NO: 30347 - DNA, 3040 bp, Homo sapiens
attaggcggcgcggggcggccggcatggagctcccggaggcgcggcagggtcaggagctcggtggcatggcggcggtggctgccccgatttcctccagctgccactccttgcttcgtgtccccggtccctagacgcctcgtctcctcccgtgtccctcttcccatggagtcagtacggatcgaacagatgctgagcttgcccgctgaggtcagcagcgacaacttggagtcggcggagcgaggggcatcagcggcccaagtagacatgggcccccacccaaaggtggctgcagagggccccgcacctctaccgacgcgggagccagagcaagagcagtctccggggacctcaacgccggagagcaaagtcctgctcacgcaggcagacgccttggcgtcccgggggcgaatccgtgaagccctcgaggtgtatagacagctctccgagcggcagcagctggtggctgagcagctggagcagctggtgcgctgcctggcggagaaagtcccgcaaggcgaggcgctggcgccggcgcccccggacgagggtagcactgcaagcggcaccgtggcggcggaagagacgggggccgccgcggctgcggcggccaccgaggtgtgggacggctttaagtgccggaaatgtcatgggtttctatcagaccccgtgtccttgtcgtgtggccacaccttttgtaaactgtgcctggaacgtgggcgggccgccgaccggcgctgtgcgctgtgcggggtcaagctctccgccttgatggtggccactgggcgggcgcgtggagcccggcgggctgggcagcagccgccgccgccgctgcgagtcaacgtggtgctcagcggcctcctcggcaagttgtttccaggcccagcgcgagcgtcgcaactccggcacgagggcaaccgactgtaccgcgagcgccaggtggaggcggcactgctcaagtacaacgaggcagttaagttggctccaaatgaccacttgctttatagcaatcggtctcagatttatttcaccttggagtctcatgagaatgcactgcatgatgcagaaatagcatgtaagctccgcccgatgggttttaaggcacatttcagaaaagcccaagccttagccaccctaggcaaggtggaggaggcactaagggagtttctctactgtgtatcccttgatggaaagaacaagagagcaagatgtgaagcccaaagagacaatctggagctcccacattgttctagtcaggaggaagcagcagccaggggagatggcagcagtctgatggacccagctaaagtgaagggggatggtcagcagcaccacatgaaagaccaggaagaagaggaggagaagtgggatgctacctctccaaaagctgcttccagcaagactggaaaatgccaggaaaagaaaaggaaacattgccagattgaatcccaagaagaaacggggatgcctaataaagcctccaagcaagatcctcccactgatcagggggacaaacctgctctcagtttaccacttgcatctttcgacgcatctgaccttgaatgcgctctatgtatgagattattctatgagccagtcacaacaccttgcgggcatactttttgcttaaaatgcctagaaagatgcctagatcacaacgcaaagtgtccattgtgcaaagacggtctttcacagtgcttggcatcaagaaaatacagcaaaaatgtaataatggaggagctcatagctaaattccttccagaagaactgaaggaacgaaggaagctttatgaagaggaaatggaagaactttctaaccttaataagaatgtgcctattttcgtgtgtactatggcctatcccaccgttccttgtcccctgcacatctttgagccttgttaccgcctgatgattcgtagatgcattgagacaggcacgagacagtttggcatgtgccttggagatcctgtcaaagggcactgcctgttgtgtaattgaagctgtaacccagggacaggaaaataggcagaagtcccttgagccacagcatggggctacagaaatggctgggtgccagcccagggaaacagaactcatcaaggatctagtctctcgactccattctcaataaacaggtttgcagaatatggctgcatcctagagatcagaaatgttcaattctttgctgatggccgctcagtggttgacagcataggcaagaggcgcttcagggtgctccatcagagccagcgggatggctacaacacagccgacattgaatacattgaagaccaaaaggttcagggagaggattgtgctgagctcatgggattacataactgtgtctatcagcaagcatcattgtggtttcattcgctcaaattatccctaaagaatcggatactcaatcactttggtcccatgccggagaaagacgccgatcctcagatgaacccgaatggcccagcctggtgctggtggatgttagcagttcttcccttggaaagccgagctcagctccccttcctagcaatgaggtccttaaaggacagactgaatggtattcgacgagtcctggccttcatatcccgaaaccaaaactagtgagtggattgccgaagaggagctcccaccttccccactgccgtcggggggagtcttcttgtaaatatatctaattgcaataatatcttaacagaagggggtgtcaaacagaggcatcagcctgctgttgatcacagagagaaattgagtagaaagaccaaaagaatgtgacctatttgaaactttctgtcttaagatgcttcttgacatgctgcataactacataaacagcagaggtgtttaagagcccagaaaaacataatttgattttaacattaaaatttccaaaagtttaaagtggttttgctttaatattctttctttcatagatcaatgactgtgtggttgaaatgtgaaaacaaagatactaataatgttgctgtataatttcactgacttgaggtctcattccaaatggttcaggttttatagagcatt

SEQ ID NO: 30348 - protein, 610 aa, Homo sapiens; identical to SEQ ID NO: 30344

SEQ ID NO: 30349 - DNA, 2527 bp, Homo sapiens
atcccacgagcatgtgcggggggagggggagcgcttgcgccccgctgccctgtgactcattgtcaccgcttcctatcacacgatcctcggctgaaatagatgcccccccttgcccgccccgccaacccgtagcctgtgccctcgcctccaacccctttaacctggccagcccggcgggaggccggcgcggcaactgcttggggatccctggggaccgtgggctggctacgaatgggtcacgcctctgtcccgcttttcagtgccgcctgggagggttgggtgggctttgcagcttcaagggtaacgtgggcagtcccccatctccagctagactagggcacccgaatttccccagggagccgctctctgacccaccacgcctggacccaggaagtggctgctgagccgccagccggtgttgcccagctctggcagtttgccaggagctcggccgtggggcgcggtgtctggcgaagcatgccggggaggaggcagcagggctgggcaggcagggccctgggatccgagggtgtcctggacctgactctgtggagtggaggaggggtgtgggccggagtctccacgtgtttaatctccactcaagcttgcaacagctccaaatgaccacttgctttatagcaatcggtctcagatttatttcaccttggagtctcatgagaatgcactgcatgatgcagaaatagcatgtaagctccgcccgatgggttttaaggcacatttcagaaaagcccaagccttagccaccctaggcaaggtggaggaggcactaagggagtttctctactgtgtatcccttgatggaaagaacaagagagcaagatgtgaagcccaaagacttctccttagtttcttttcaccatcagtcccgggggattctcaggaacattctcccgatatcctgaagctgttggcacctcaccctagattaaaggaaaacgtagagtcaatgactactgaagttaccagccataatctaccaaggttgttacaggacaatctggagctcccacattgttctagtcaggaggaagcagcagccaggggagatggcagcagtctgatggacccagctaaagtgaagggggatggtcagcagcaccacatgaaagaccaggaagaagaggaggagaagtgggatgctacctctccaaaagctgcttccagcaagactggaaaatgccaggaaaagaaaaggaaacattgccagattgaatcccaagaagaaacggggatgcctaataaagcctccaagcaagatcctcccactgatcagggggacaaacctgctctcagtttaccacttgcatctttcgacgcatctgaccttgaatgcgctctatgtatgagattattctatgagccagtcacaacaccttgcgggcatactttttgcttaaaatgcctagaaagatgcctagatcacaacgcaaagtgtccattgtgcaaagacggtctttcacagtgcttggcatcaagaaaatacagcaaaaatgtaataatggaggagctcatagctaaattccttccagaagaactgaaggaacgaaggaagctttatgaagaggaaatggaagaactttctaaccttaataagaatgtgcctattttcgtgtgtactatggcctatcccaccgttccttgtcccctgcacatctttgagccttgttaccgcctgatgattcgtagatgcattgagacaggcacgagacagtttggcatgtgccttggagatcctgtcaaagggtttgcagaatatggctgcatcctagagatcagaaatgttcaattctttgctgatggccgctcagtggttgacagcataggcaagaggcgcttcagggtgctccatcagagccagcgggatggctacaacacagccgacattgaatacattgaagaccaaaaggttcagggagaggattgtgctgagctcatgggattacataactgtgtctatcagcaagcatcattgtggtttcattcgctcaaattatccctaaagaatcggatactcaatcactttggtcccatgccggagaaagacgccgatcctcagatgaacccgaatggcccagcctggtgctggtggatgttagcagttcttcccttggaaagccgagctcagctccccttcctagcaatgaggtccttaaaggacagactgaatggtattcgacgagtcctggccttcatatcccgaaaccaaaactagtgagtggattgccgaagaggagctcccaccttccccactgccgtcggggggagtcttcttgtaaatatatctaattgcaataatatcttaacagaagggggtgtcaaacagaggcatcagcctgctgttgatcacagagagaaattgagtagaaagaccaaaagaatgtgacctatttgaaactttctgtcttaagatgcttcttgacatgctgcataactacataaacagcagaggtgtttaagagcccagaaaaacataatttgattttaacattaaaatttccaaaagttt

SEQ ID NO: 30350 - protein, 503 aa, Homo sapiens
MGFKAHFRKAQALATLGKVEEALREFLYCVSLDGKNKRARCEAQRLLLSFFSPSVPGDSQEHSPDILKLLAPHPRLKENVESMTTEVTSHNLPRLLQDNLELPHCSSQEEAAARGDGSSLMDPAKVKGDGQQHHMKDQEEEEEKWDATSPKAASSKTGKCQEKKRKHCQIESQEETGMPNKASKQDPPTDQGDKPALSLPLASFDASDLECALCMRLFYEPVTTPCGHTFCLKCLERCLDHNAKCPLCKDGLSQCLASRKYSKNVIMEELIAKFLPEELKERRKLYEEEMEELSNLNKNVPIFVCTMAYPTVPCPLHIFEPCYRLMIRRCIETGTRQFGMCLGDPVKGFAEYGCILEIRNVQFFADGRSVVDSIGKRRFRVLHQSQRDGYNTADIEYIEDQKVQGEDCAELMGLHNCVYQQASLWFHSLKLSLKNRILNHFGPMPEKDADPQMNPNGPAWCWWMLAVLPLESRAQLPFLAMRSLKDRLNGIRRVLAFISRNQN

SEQ ID NO: 30351 - DNA, 2671 bp, Homo sapiens
atcccacgagcatgtgcggggggagggggagcgcttgcgccccgctgccctgtgactcattgtcaccgcttcctatcacacgatcctcggctgaaatagatgcccccccttgcccgccccgccaacccgtagcctgtgccctcgcctccaacccctttaacctggccagcccggcgggaggccggcgcggcaactgcttggggatccctggggaccgtgggctggctacgaatgggtcacgcctctgtcccgcttttcagtgccgcctgggagggttgggtgggctttgcagcttcaagggtaacgtgggcagtcccccatctccagctagactagggcacccgaatttccccagggagccgctctctgacccaccacgcctggacccaggaagtggctgctgagccgccagccggtgttgcccagctctggcagtttgccaggagctcggccgtggggcgcggtgtctggcgaagcatgccggggaggaggcagcagggctgggcaggcagggccctgggatccgagggtgtcctggacctgactctgtggagtggaggaggggtgtgggccggagtctccacgtgtttaatctccactcaagcttgcaacagctccaaatgaccacttgctttatagcaatcggtctcagatttatttcaccttggagtctcatgagaatgcactgcatgatgcagaaatagcatgtaagctccgcccgatgggttttaaggcacatttcagaaaagcccaagccttagccaccctaggcaaggtggaggaggcactaagggagtttctctactgtgtatcccttgatggaaagaacaagagagcaagatgtgaagcccaaagacttctccttagtttcttttcaccatcagtcccgggggattctcaggaacattctcccgatatcctgaagctgttggcacctcaccctagattaaaggaaaacgtagagtcaatgactactgaagttaccagccataatctaccaaggttgttacaggacaatctggagctcccacattgttctagtcaggaggaagcagcagccaggggagatggcagcagtctgatggacccagctaaagtgaagggggatggtcagcagcaccacatgaaagaccaggaagaagaggaggagaagtgggatgctacctctccaaaagctgcttccagcaagactggaaaatgccaggaaaagaaaaggaaacattgccagattgaatcccaagaagaaacggggatgcctaataaagcctccaagcaagatcctcccactgatcagggggacaaacctgctctcagtttaccacttgcatctttcgacgcatctgaccttgaatgcgctctatgtatgagattattctatgagccagtcacaacaccttgcgggcatactttttgcttaaaatgcctagaaagatgcctagatcacaacgcaaagtgtccattgtgcaaagacggtctttcacagtgcttggcatcaagaaaatacagcaaaaatgtaataatggaggagctcatagctaaattccttccagaagaactgaaggaacgaaggaagctttatgaagaggaaatggaagaactttctaaccttaataagaatgtgcctattttcgtgtgtactatggcctatcccaccgttccttgtcccctgcacatctttgagccttgttaccgcctgatgattcgtagatgcattgagacaggcacgagacagtttggcatgtgccttggagatcctgtcaaagggtttgcagaatatggctgcatcctagagatcagaaatgttcaattctttgctgatggccgctcagtggttgacagcataggcaagaggcgcttcagggtgctccatcagagccagcgggatggctacaacacagccgacattgaatacattgaagaccaaaaggttcagggagaggattgtgctgagctcatgggattacataactgtgtctatcagcaagcatcattgtggtttcattcgctcaaattatccctaaagaatcggatactcaatcactttggtcccatgccggagaaagacgccgatcctcagatgaacccgaatggcccagcctggtgctggtggatgttagcagttcttcccttggaaagccgagctcagctccccttcctagcaatgaggtccttaaaggacagactgaatggtattcgacgagtcctggccttcatatcccgaaaccaaaactagtgagtggattgccgaagaggagctcccaccttccccactgccgtcggggggagtcttcttgtaaatatatctaattgcaataatatcttaacagaagggggtgtcaaacagaggcatcagcctgctgttgatcacagagagaaattgagtagaaagaccaaaagaatgtgacctatttgaaactttctgtcttaagatgcttcttgacatgctgcataactacataaacagcagaggtgtttaagagcccagaaaaacataatttgattttaacattaaaatttccaaaagtttaaagtggttttgctttaatattctttctttcatagatcaatgactgtgtggttgaaatgtgaaaacaaagatactaataatgttgctgtataatttcactgacttgaggtctcattccaaatggttcaggttttatagagcatt

SEQ ID NO: 30352 - protein, 503 aa, Homo sapiens; identical to SEQ ID NO: 30350

SEQ ID NO: 30353 - DNA, 6944 bp, Homo sapiens
cagagatcccatatttccagaactctgcctaaacctaggagtaaggttcctggagttgtgtctggagccatgtcaggagctgtgcttcaaaatgtgcctacaagtgcagtctgggttgctggccccaagatcactgagaacccaccatcgcgccgacgccgactcagcatcatcccacctgttatccaacctgaaataatttctaagaacttggtagaaatctctctcgatgatgagtcacctaagaatccacaaaagaaggctttaccacataagagtttgacagcgactcagagcttctctgagttatcatctggacctgattgctcacagtccttgactgcatttgccacacttgcctctaccagtagcacccagctgcccattggtttcagcaccccagccaccacccagggctgtttggattcttcagctgctcgccacaaaatgactttaaatccccgcaaacaaaagaagaaccttcaagtgattgtggaaccaaaggaggaggagccaaaccttccattggtttctgaagaagaaaagagcataaccaaaccaaaagaaatcaacgaaaagaagctgggaatggacagtgcagattcctcaagccagaaacagaacaacaaaactgagatgtatgataagaagacaacagaccaggctccaaacactgatgcttctcggagtcagggctatccaatgtcagcagcatatggaagaagatggagaagaaaaggagcaagtgtttcaggattgagtgggtgtgaattcaaaggaagaagccttaaacaatccagtgaagggtatggcctgggcgatagagctgggtcttcacctaccaataagactgccaggaatgtccctttctcgcacttgtccttagagaaggacaacatggagcagcctacaacttcacaaccagaaaccactacccctcaggggttgctttcagataaagatgacatgggaaggagaaatgctggcatagatttcggatccagaaaagcatcagcagcacagcccatacctgaaaacatggacaattccatggttagtgatccacaaccataccatgaagatgcagcttctggagctgagaagacagaagccagagcttctctctcactgatggtggaaagcctttctacaacccaagaggaggccattctctcagtagcagcagaggctcaggtgtttatgaatccttctcatatccagttagaagatcaagaagctttcagctttgatttacaaaaggcccaatccaaaatggagtcagcccaggatgttcaaactatctgcaaagaaaagccttctggaaatgttcaccagacctttacagcaagtgttttgggtatgacaagtactacagccaaaggagatgtttatgccaagactctgcctcccagaagcctttttcagtcctcaaggaagcctgatgctgaagaagtctcctcagattcagagaatattcctgaggagggggatggttctgaagaactggctcatggtcactcttcccagtccttggggaagtttgaagatgaacaagaagtcttctcagaatcaaaaagttttgttgaggacttgagcagctctgaggaggagctggacctcagatgcctctcccaggctttagaggagcctgaagatgcagaagtcttcacagaatcaagcagttatgttgaaaagtacaacacttctgatgattgcagcagctcagaggaagacctgcctctcagacaccctgctcaggccttgggaaagcccaaaaaccaacaagaagtctcctctgcttcaaataatactcctgaagagcagaatgattttatgcagcagctgccttccagatgcccttctcagcccattatgaatcctactgttcagcaacaagtccccaccagttcagtgggcacttctataaaacagagcgattccgtggagccaatccctccaagacaccctttccagccatgggtgaaccctaaagtggagcaagaagtttcctcatctccaaagagcatggctgttgaagagagcatttctatgaagcctctgcctcctaaacttctttgccagcccttgatgaatcctaaagttcaacaaaacatgttctcaggttcagaggacattgctgttgagagagtcatttctgtggagccactactccccagatattctcctcagtccttgacagatcctcaaatccggcaaatctcagaaagcacagctgttgaggaaggcacttatgtggaaccgctgcctcccagatgcctttcccagccctcggagaggcctaagttcctggactcaatgagtacttctgcagaatggagcagtcctgtggcaccaacaccttccaaatacacttccccgccatgggtgacccctaaatttgaggaactgtatcaactctctgcacatccagaaagcactactgttgaagaggacatttctaaggagcagctgcttcccagacatctttcccagttgactgtgggaaataaagtccagcaactgtcctcaaatttcgagcgggctgctattgaggcagacatttctgggagtccattgcctccccaatatgctacccagttcttaaagaggtctaaagttcaggaaatgacctcacgactagagaaaatggctgttgaaggcacttctaacaaatcaccgattcccaggcgtccgacccagtcattcgtgaaatttatggcacagcaaatcttttcagagagctctgctcttaagaggggcagtgatgtggcacctctgcctcccaatcttccttccaaatctttatcaaagcctgaagtcaagcaccaagttttctcagattcagggagtgctaatcctaagggaggcatttcttcaaagatgctacctatgaagcaccctttacagtccttggggaggcctgaagacccacagaaagttttctcttattcagagagagctcctgggaagtgcagcagttttaaagagcagctgtctcccaggcagctttcccaggccttgaggaaacctgagtatgagcaaaaagtctcccctgtttctgccagttctcctaaagagtggaggaattctaaaaagcagctgcctcccaaacattcttcccaagcctcagataggtctaaattccagccacagatgtcatcaaagggcccagtgaatgtacctgtaaagcagagcagcggtgagaagcacctgccttcaagtagtcctttccagcaacaggttcattcaagttctgtgaatgctgctgctaggcgatctgtttttgagagcaattctgacaattggttcctaggaagagatgaagcttttgcaatcaaaaccaagaaattcagccaaggttccaaaaaccccataaagagcattccagcccctgctaccaaacctgggaagttcaccattgctcctgtcaggcaaacatccacttctgggggcatttactctaagaaagaagatcttgagagtggtgatggtaataataaccagcatgcaaacctatccaatcaggatgatgttgaaaagctttttggagttcgactgaaaagagcccctccctcgcagaagtataagagtgagaaacaagataacttcacccagcttgcttcagtgccctcgggcccaatttcatcctctgtaggcaggggacataaaatcagaagcacttcccaggggctcctggatgctgcagggaacctcaccaaaatatcttacgttgcagataagcaacagagcaggcccaaatctgaaagcatggccaagaagcaacctgcttgcaagaccccaggaaagcctgctggtcaacagtcagattatgctgtctcagagccggtttggataactatggcaaagcagaagcagaagagtttcaaggcccacatttctgtgaaagagctgaaaactaagagcaatgctggagccgatgctgagactaaggagcctaaatatgagggagctggctctgcaaatgaaaaccaacctaaaaagatgttcacttccagtgtccataaacaggagaagacagcacagatgaagccacctaagcctacaaaatcagttggatttgaagctcagaagatactgcaagttcctgccatggaaaaagaaaccaaacgatcttcaactctcccagccaagttccagaacccagttgagccaattgagcctgtctggttctcactggccaggaagaaagccaaagcatggagccacatggcagaaatcacgcaataaagagctcttgtgtggagcatcagcatttattttatttagtttttttttttttttttttttttgagacagagtctcgctctgttacccagattggagtgcagtggcgcgatctccgctcactgcaagctccgcctcccgggttcacgccactctcccgcctcagtctcccgactagctgggactacaggcgcccgccatcacgcccggctaattttgttttcgtatttttagtagagacggggtttcaccatgttggccaggatggtcttgatctcctgacctcgtgatccgcccgcctcagcctcccaaaagctgggattacaggcgtgagccaccgcgcccggccaagcatcagcgttttaaatgataattgctaatagctgtattaattctatgtagtgatctttttactgtgaccacttgtattaagcaaaataagtattaagcaaactaagaatttattaagcaaaataagaatttattaagcaaaatagccttagaaatgcaaattaaaacataattatttgaatgaaataaatgccatgaatgcttaaccttccacgtagtcactgccagcacccagaaacccagcatttcctctattaaaactatcgaaaacatttgcactgctgtaaaattgcaaaatctttaactttggacaatgtgctttagaagggagaaagcaaaaacattttgttggagcaactagaaaattgtcatttccctcaaccaaataaagtaattctaatggaaacattcagatgatttgacctaaagattggcctttaggttttatgagcctagatagatgccgcaattatttggttgttgctctaagctttgcaagggatcctaaaagaggcggtggaagtgaaaattctgggtctccaagaaaatttctgcacagccagttctccaatcagcctatcaccccttgaaacatcttccctgtgtccctgggggcccctgatgctttctccttgggtgatagtaacatgcagagcacttacacaaagctccctctttggacataccccacgtcgacctgtcacaggcctggctgtagcgagcacctccctatgacgcagaatgcttcttgggaattatcttactcctctggagggttagtccatcaatgttttgcttcttgtcccaatactactgtgaccctctctgatcgcacagaaatcactgcctatcacatatatcctgttaagcactgaagaccctattgaaattagagttctacagatgccaaaagctgtactttccatcaggcagatggcaagcttactgccttgatgcacatctggagccactggagctccttcctctctggttccagcattaaggtggagaactccatgtagcttcttgtcctttcccctcagctgtctttgcttcacaaggttttagcccaaagcaagagtgcaatcccaaagccacagagaaatgaactttccgctacctggaagctttaagtgagtaaatcagcttttcccctctcattcctagaggcacacacctcaaaagttactaggctggagagaccctaccttccagtgacccactcatcccccagccacggagaagagggaagaccaaaaagggagagtgagaaagaggatgagagggatggtcagctgtgaggggagggggcaagtggcccagcaaatgttgatgcctcccttcccatcttgccacacggtctttttcttttgtagcacagcctccattaataactcctcggctgaggatgaagatgtaggcacctttacccccagagccagttccttaattggctggctttctgagatgcagaccaccctagaatctcatctaggttcactagaagttagttaaatcttcctttctctgtctttctcttcattccatcccccaaacccaccaaacactaagggagagctccctttggatgtctgggcagtaaacctagctcatttttctaggagacccagaagtgacttctgagtagttatcactgtgtctgcctctgttacactgtgctgctttgcttaaacagaaatgcaggcctggacatctgactgtgcctttatattctgagtggggtgctgccccatgcaaaaaaatccagagaggtagtgaggtgtcagagctaaacacttggtgctgggttttgttgatgctggtataatgtgacacagtacaattacatgctaaattttgcattttctctatataacatctatttttcctgatactgtgcctttgccattttgataatgctattttgattgagtgaattttatttcctttgtattcccatagtgaacaatatattaaggtagatgccctttatctgggtactcctggtagattagctgttacacctcccttcccttttttacagtgaacctgtattcagttattgtcactctgagaactctccaataacaatttcttttccacagttaacaacacagctgttacacctcccttcctttttttcacagtgaacctgtattcagctattctcactctgagaactctccaataacaatttcttttccacagttaacaacaaagttctgtttttaaatgaagagattaagttctttttaaatgcctaaaggcatattctgacaacttttctacttctttaacttttttgatttaagatatatgcaaagcaaataaattcaataaagcctatt

SEQ ID NO: 30354 - protein, 1392 aa, Homo sapiens
MSGAVLQNVPTSAVWVAGPKITENPPSRRRRLSIIPPVIQPEIISKNLVEISLDDESPKNPQKKALPHKSLTATQSFSELSSGPDCSQSLTAFATLASTSSTQLPIGFSTPATTQGCLDSSAARHKMTLNPRKQKKNLQVIVEPKEEEPNLPLVSEEEKSITKPKEINEKKLGMDSADSSSQKQNNKTEMYDKKTTDQAPNTDASRSQGYPMSAAYGRRWRRKGASVSGLSGCEFKGRSLKQSSEGYGLGDRAGSSPTNKTARNVPFSHLSLEKDNMEQPTTSQPETTTPQGLLSDKDDMGRRNAGIDFGSRKASAAQPIPENMDNSMVSDPQPYHEDAASGAEKTEARASLSLMVESLSTTQEEAILSVAAEAQVFMNPSHIQLEDQEAFSFDLQKAQSKMESAQDVQTICKEKPSGNVHQTFTASVLGMTSTTAKGDVYAKTLPPRSLFQSSRKPDAEEVSSDSENIPEEGDGSEELAHGHSSQSLGKFEDEQEVFSESKSFVEDLSSSEEELDLRCLSQALEEPEDAEVFTESSSYVEKYNTSDDCSSSEEDLPLRHPAQALGKPKNQQEVSSASNNTPEEQNDFMQQLPSRCPSQPIMNPTVQQQVPTSSVGTSIKQSDSVEPIPPRHPFQPWVNPKVEQEVSSSPKSMAVEESISMKPLPPKLLCQPLMNPKVQQNMFSGSEDIAVERVISVEPLLPRYSPQSLTDPQIRQISESTAVEEGTYVEPLPPRCLSQPSERPKFLDSMSTSAEWSSPVAPTPSKYTSPPWVTPKFEELYQLSAHPESTTVEEDISKEQLLPRHLSQLTVGNKVQQLSSNFERAAIEADISGSPLPPQYATQFLKRSKVQEMTSRLEKMAVEGTSNKSPIPRRPTQSFVKFMAQQIFSESSALKRGSDVAPLPPNLPSKSLSKPEVKHQVFSDSGSANPKGGISSKMLPMKHPLQSLGRPEDPQKVFSYSERAPGKCSSFKEQLSPRQLSQALRKPEYEQKVSPVSASSPKEWRNSKKQLPPKHSSQASDRSKFQPQMSSKGPVNVPVKQSSGEKHLPSSSPFQQQVHSSSVNAAARRSVFESNSDNWFLGRDEAFAIKTKKFSQGSKNPIKSIPAPATKPGKFTIAPVRQTSTSGGIYSKKEDLESGDGNNNQHANLSNQDDVEKLFGVRLKRAPPSQKYKSEKQDNFTQLASVPSGPISSSVGRGHKIRSTSQGLLDAAGNLTKISYVADKQQSRPKSESMAKKQPACKTPGKPAGQQSDYAVSEPVWITMAKQKQKSFKAHISVKELKTKSNAGADAETKEPKYEGAGSANENQPKKMFTSSVHKQEKTAQMKPPKPTKSVGFEAQKILQVPAMEKETKRSSTLPAKFQNPVEPIEPVWFSLARKKAKAWSHMAEITQ

SEQ ID NO: 30355 - DNA, 5193 bp, Homo sapiens
gagggggtgtgagagatcctgggagcgagagggagagagagggagcaagaaaggaagagagagcgagcgagagagagcgagcgaataagagagagagtaagagggagagagaagaagaggaagaagaggaggcggcggcagcggaggaggaggaggactagtgtggggtggaaaggaagagtgagcgagagcaagttaaggggagggggtgtaagagccagcgaattctttttctttttctattattattttgacgactcctgagttgcgcccatgctcttgtcagcttcgttttaggcgtacatggccaggcagaagaaaatggggcaaagcgtgctccgggcggtcttctttttagtcctggggcttttgggtcattctcacggaggattccccaacaccatcagcataggtggacttttcatgagaaacacagtgcaggagcacagcgctttccgctttgccgtgcagttatacaacaccaaccagaacaccaccgagaagcccttccatttgaattaccacgtagatcacttggattcctccaatagtttttccgtgacaaatgctttctgctcccagttctcgagaggggtgtatgccatctttggattctatgaccagatgtcaatgaacaccctgacctccttctgtggggccctgcacacatcctttgttacgcctagcttccccactgacgcagatgtgcagtttgtcatccagatgcgcccagccttgaagggcgctattctgagtcttctgggtcattacaagtgggagaagtttgtgtacctctatgacacagaacgaggattttccatcctccaagcgattatggaagcagcagtgcaaaacaactggcaagtaacagcaaggtctgtgggaaacataaaggacgtccaagaattcaggcgcatcattgaagaaatggacaggaggcaggaaaagcgatacttgattgactgcgaagtcgaaaggattaacacaattttggaacaggttgtgatcctagggaaacactcaagaggttatcactacatgctcgctaacctgggttttactgatattttactggaaagagtcatgcatgggggagccaacattacaggtttccagattgtcaacaatgaaaaccctatggttcagcagttcatacagcgctgggtgaggctggatgaaagggaattccctgaagccaagaatgcaccactaaagtatacatctgcattgacacacgacgcaatactggtcatagcagaagctttccgctacctgaggaggcagcgagtagatgtgtcccggagaggaagtgctggagactgcttagcaaatcctgctgtgccctggagtcaaggaattgatattgagagagctctgaaaatggtgcaagtacaaggaatgactggaaatattcaatttgacacttatggacgtaggacaaattataccatcgatgtgtatgaaatgaaagtcagtggctctcgaaaagctggctactggaatgagtatgaaaggtttgtgcctttctcagatcagcaaatcagcaatgacagtgcatcctcagagaatcggaccatagtagtgactaccattctggaatcaccatatgtaatgtacaagaagaaccatgagcaactggaaggaaatgaacgatatgaaggctattgtgtagacctagcctatgaaatagccaaacatgtaaggatcaaatacaaattgtccatcgttggtgacgggaaatatggtgcaagggatccagagactaaaatatggaacggcatggttggggaacttgtctatgggagagctgatatagctgttgctccactcactataacattggtccgtgaagaagtcatagatttttcaaagccattcatgagcctgggcatctccatcatgataaagaagcctcagaaatcaaaaccaggcgtattctcatttctggatcccctggcttatgaaatctggatgtgcattgtctttgcttacattggagtcagcgtagttcttttcctagtcagcaggttcagtccttatgaatggcacttggaagacaacaatgaagaacctcgtgacccacaaagtcctcctgatcctccaaatgaatttggaatatttaacagtctttggttttccttgggtgcctttatgcagcaaggatgtgatatttctccaagatcactctccgggcgcattgttggaggggtttggtggttcttcaccctgatcataatttcttcctatactgccaatctcgctgctttcctgactgtggagaggatggtttctcccatagagagtgctgaagacttagctaaacagactgaaattgcatatgggaccctggactccggttcaacaaaagaatttttcagaagatccaaaattgctgtgtacgagaaaatgtggtcttacatgaaatcagcggagccatctgtgtttaccaaaacaacagcagacggagtggcccgagtgcgaaagtccaagggaaagttcgccttcctgctggagtcaaccatgaatgagtacattgagcagagaaaaccatgtgatacgatgaaagttggtggaaatctggattccaaaggctatggtgtggcaacccctaaaggctcagcattaagaaatgctgttaacctggcagtattaaaactgaatgagcaaggcctcttggacaaattgaaaaacaaatggtggtacgacaaaggagagtgcggcagcgggggcggtgactccaaggacaagaccagcgctctgagcctgagcaatgtggcaggcgttttctatatacttgtcggaggtctggggctggccatgatggtggctttgatagaattctgttacaaatcacgggcagagtccaaacgcatgaaactcacaaagaacacccaaaactttaagcctgctcctgccaccaacactcagaattatgctacatacagagaaggctacaacgtgtatggaacagagagtgttaagatctagggatcccttcccactggaggcatgtgatgagaggaaatcaccgaaaacgtggctgcttcaaggatcctgagccagatttcactctccttggtgtcgggcatgacacgaatattgctgatggtgcaatgacctttcaataggaaaaactgatttttttttccttcagtgccttatggaacactctgagactcgcgacaatgcaaaccatcattgaaatctttttgctttgcttgaaaaaaaataattaaaataaaaaccaacaaaaatggacatgcaagattccagtatgcgaaaaaaaatcttattaagtcaattcaacaaaagccattctttgataccactgcagagtatataaacaccatgttctttaatacacacacacacacacacacacacacacacacacatttaaattccaattcagcaaagaggcccatctaagctaaaaaaattaattcttcctgattaaaaagaaaaaatctgtctcccagtgtttgggaagacggactggcatttcttctaggatctgctgaccagatgtttttggtatttcctgttggtggtgatgttctgtgcactctatttcctttcaatgttgctgaaatgtgtatatctttagaatgtaaatgcaacacttaagaaaattcaaacactttggaaaagggactaaacagtgatttctctgtgttcttgaaatggttttgtgaaaatgctttgataacttcccactcaaagaagagatttacagagctttcgaaattgactttgtgtgtagcaagggacggggcactatcaggatacctcttggtgctttcctaaaatggatcccggggctttccaaggagcctggaatttcagctcacagatctgtttttcttgcttcagtgtgcattttaagtcaatagagctgagtatctagcattgaggtgagggaaatgctgcctatactcccagatgtgtttagaatatctcagaaacaacactgtgtttagctcggctttctctgctaagtatgcctttcaagtgtacaccacggagacaggaccgcgttgcaaggcgggacagcaggttcagaccacagttctcagtctgactttactcttgctaggtctgtcctactagctgttgcctgctaccgcccatggctctccatcggactgcatgtgtccttttctagtttgcaaagactaaaatgcattcccaaacctactgctaatctgagggcctcagcatcacttccagatccttgcttggagcagtctctctattgactctctcagatcgctccactgctccatgggctatcaagtaactaactgcatacctgccgttggcatcatcagaacagtccgaagaaatagtctccactcactaattacctcctatataacgacgtatgcttcctgtagttcagtagtttgctctcatcgataacgtgcattgggaagtttccagactgcaaaaactaggagctcgcattcatttcccaagtgtgacccttagatgcttagttgactcgctgcatatttgctcttgtcttcagaaaagaaaggaagaagtatcgttccaacgaaatgtttccagaaaagtgtactataaactttcattccaaaaatggtgtcataagcaaacaactcacttgtcaaatttcaaatggtattgaacaaaaaaagaaagctgttgtgtttttgttttgttttgttttcatgaaactgtgattttcaacttatgaatgctataatgtcccagcgcgggaagctcacgctgtgtgaacatgaagttgtataaaacaaaccaaccaacctacacacaaatgttttcataggcactgtataaagaaaaatgtatgtttattaactcaaatcagtttttcagagaggaaacgtcactgagatgaagaggcgggtaaattggtttgttattttttaaaaaaaacttgcatgtttaaaaaaaagttgattgcttcaaatttctgctactaacttcaagctatgggagtttggcagtagtcacttgaggattttttttccaattcttttctttttgttgttaaagctgtacttcagtgaacagaaaaattgccaagcaaactaatggctataaaagcgtaatttgcatgtgtgggcataaactacagagcctcattgccatgaggtattgtacaaagttttaatacattttgtaaataaaattgtaaagaaagaa

SEQ ID NO: 30356 - protein, 894 aa, Homo sapiens
MARQKKMGQSVLRAVFFLVLGLLGHSHGGFPNTISIGGLFMRNTVQEHSAFRFAVQLYNTNQNTTEKPFHLNYHVDHLDSSNSFSVTNAFCSQFSRGVYAIFGFYDQMSMNTLTSFCGALHTSFVTPSFPTDADVQFVIQMRPALKGAILSLLGHYKWEKFVYLYDTERGFSILQAIMEAAVQNNWQVTARSVGNIKDVQEFRRIIEEMDRRQEKRYLIDCEVERINTILEQVVILGKHSRGYHYMLANLGFTDILLERVMHGGANITGFQIVNNENPMVQQFIQRWVRLDEREFPEAKNAPLKYTSALTHDAILVIAEAFRYLRRQRVDVSRRGSAGDCLANPAVPWSQGIDIERALKMVQVQGMTGNIQFDTYGRRTNYTIDVYEMKVSGSRKAGYWNEYERFVPFSDQQISNDSASSENRTIVVTTILESPYVMYKKNHEQLEGNERYEGYCVDLAYEIAKHVRIKYKLSIVGDGKYGARDPETKIWNGMVGELVYGRADIAVAPLTITLVREEVIDFSKPFMSLGISIMIKKPQKSKPGVFSFLDPLAYEIWMCIVFAYIGVSVVLFLVSRFSPYEWHLEDNNEEPRDPQSPPDPPNEFGIFNSLWFSLGAFMQQGCDISPRSLSGRIVGGVWWFFTLIIISSYTANLAAFLTVERMVSPIESAEDLAKQTEIAYGTLDSGSTKEFFRRSKIAVYEKMWSYMKSAEPSVFTKTTADGVARVRKSKGKFAFLLESTMNEYIEQRKPCDTMKVGGNLDSKGYGVATPKGSALRNAVNLAVLKLNEQGLLDKLKNKWWYDKGECGSGGGDSKDKTSALSLSNVAGVFYILVGGLGLAMMVALIEFCYKSRAESKRMKLTKNTQNFKPAPATNTQNYATYREGYNVYGTESVKI

SEQ ID NO: 30357 - DNA, 5193 bp, Homo sapiens
gagggggtgtgagagatcctgggagcgagagggagagagagggagcaagaaaggaagagagagcgagcgagagagagcgagcgaataagagagagagtaagagggagagagaagaagaggaagaagaggaggcggcggcagcggaggaggaggaggactagtgtggggtggaaaggaagagtgagcgagagcaagttaaggggagggggtgtaagagccagcgaattctttttctttttctattattattttgacgactcctgagttgcgcccatgctcttgtcagcttcgttttaggcgtacatggccaggcagaagaaaatggggcaaagcgtgctccgggcggtcttctttttagtcctggggcttttgggtcattctcacggaggattccccaacaccatcagcataggtggacttttcatgagaaacacagtgcaggagcacagcgctttccgctttgccgtgcagttatacaacaccaaccagaacaccaccgagaagcccttccatttgaattaccacgtagatcacttggattcctccaatagtttttccgtgacaaatgctttctgctcccagttctcgagaggggtgtatgccatctttggattctatgaccagatgtcaatgaacaccctgacctccttctgtggggccctgcacacatcctttgttacgcctagcttccccactgacgcagatgtgcagtttgtcatccagatgcgcccagccttgaagggcgctattctgagtcttctgggtcattacaagtgggagaagtttgtgtacctctatgacacagaacgaggattttccatcctccaagcgattatggaagcagcagtgcaaaacaactggcaagtaacagcaaggtctgtgggaaacataaaggacgtccaagaattcaggcgcatcattgaagaaatggacaggaggcaggaaaagcgatacttgattgactgcgaagtcgaaaggattaacacaattttggaacaggttgtgatcctagggaaacactcaagaggttatcactacatgctcgctaacctgggttttactgatattttactggaaagagtcatgcatgggggagccaacattacaggtttccagattgtcaacaatgaaaaccctatggttcagcagttcatacagcgctgggtgaggctggatgaaagggaattccctgaagccaagaatgcaccactaaagtatacatctgcattgacacacgacgcaatactggtcatagcagaagctttccgctacctgaggaggcagcgagtagatgtgtcccggagaggaagtgctggagactgcttagcaaatcctgctgtgccctggagtcaaggaattgatattgagagagctctgaaaatggtgcaagtacaaggaatgactggaaatattcaatttgacacttatggacgtaggacaaattataccatcgatgtgtatgaaatgaaagtcagtggctctcgaaaagctggctactggaatgagtatgaaaggtttgtgcctttctcagatcagcaaatcagcaatgacagtgcatcctcagagaatcggaccatagtagtgactaccattctggaatcaccatatgtaatgtacaagaagaaccatgagcaactggaaggaaatgaacgatatgaaggctattgtgtagacctagcctatgaaatagccaaacatgtaaggatcaaatacaaattgtccatcgttggtgacgggaaatatggtgcaagggatccagagactaaaatatggaacggcatggttggggaacttgtctatgggagagctgatatagctgttgctccactcactataacattggtccgtgaagaagtcatagatttttcaaagccattcatgagcctgggcatctccatcatgataaagaagcctcagaaatcaaaaccaggcgtattctcatttctggatcccctggcttatgaaatctggatgtgcattgtctttgcttacattggagtcagcgtagttcttttcctagtcagcaggttcagtccttatgaatggcacttggaagacaacaatgaagaacctcgtgacccacaaagtcctcctgatcctccaaatgaatttggaatatttaacagtctttggttttccttgggtgcctttatgcagcaaggatgtgatatttctccaagatcactctccgggcgcattgttggaggggtttggtggttcttcaccctgatcataatttcttcctatactgccaatctcgctgctttcctgactgtggagaggatggtttctcccatagagagtgctgaagacttagctaaacagactgaaattgcatatgggaccctggactccggttcaacaaaagaatttttcagaagatccaaaattgctgtgtacgagaaaatgtggtcttacatgaaatcagcggagccatctgtgtttaccaaaacaacagcagacggagtggcccgagtgcgaaagtccaagggaaagttcgccttcctgctggagtcaaccatgaatgagtacattgagcagagaaaaccatgtgatacgatgaaagttggtggaaatctggattccaaaggctatggtgtggcaacccctaaaggctcagcattaagaacgcctgtaaaccttgcagtattgaaactcagtgaacaaggcatcttagacaagctgaaaaacaaatggtggtacgataagggggaatgtggagccaaggactccgggagtaaggacaagaccagcgctctgagcctgagcaatgtggcaggcgttttctatatacttgtcggaggtctggggctggccatgatggtggctttgatagaattctgttacaaatcacgggcagagtccaaacgcatgaaactcacaaagaacacccaaaactttaagcctgctcctgccaccaacactcagaattatgctacatacagagaaggctacaacgtgtatggaacagagagtgttaagatctagggatcccttcccactggaggcatgtgatgagaggaaatcaccgaaaacgtggctgcttcaaggatcctgagccagatttcactctccttggtgtcgggcatgacacgaatattgctgatggtgcaatgacctttcaataggaaaaactgatttttttttccttcagtgccttatggaacactctgagactcgcgacaatgcaaaccatcattgaaatctttttgctttgcttgaaaaaaaataattaaaataaaaaccaacaaaaatggacatgcaagattccagtatgcgaaaaaaaatcttattaagtcaattcaacaaaagccattctttgataccactgcagagtatataaacaccatgttctttaatacacacacacacacacacacacacacacacacacatttaaattccaattcagcaaagaggcccatctaagctaaaaaaattaattcttcctgattaaaaagaaaaaatctgtctcccagtgtttgggaagacggactggcatttcttctaggatctgctgaccagatgtttttggtatttcctgttggtggtgatgttctgtgcactctatttcctttcaatgttgctgaaatgtgtatatctttagaatgtaaatgcaacacttaagaaaattcaaacactttggaaaagggactaaacagtgatttctctgtgttcttgaaatggttttgtgaaaatgctttgataacttcccactcaaagaagagatttacagagctttcgaaattgactttgtgtgtagcaagggacggggcactatcaggatacctcttggtgctttcctaaaatggatcccggggctttccaaggagcctggaatttcagctcacagatctgtttttcttgcttcagtgtgcattttaagtcaatagagctgagtatctagcattgaggtgagggaaatgctgcctatactcccagatgtgtttagaatatctcagaaacaacactgtgtttagctcggctttctctgctaagtatgcctttcaagtgtacaccacggagacaggaccgcgttgcaaggcgggacagcaggttcagaccacagttctcagtctgactttactcttgctaggtctgtcctactagctgttgcctgctaccgcccatggctctccatcggactgcatgtgtccttttctagtttgcaaagactaaaatgcattcccaaacctactgctaatctgagggcctcagcatcacttccagatccttgcttggagcagtctctctattgactctctcagatcgctccactgctccatgggctatcaagtaactaactgcatacctgccgttggcatcatcagaacagtccgaagaaatagtctccactcactaattacctcctatataacgacgtatgcttcctgtagttcagtagtttgctctcatcgataacgtgcattgggaagtttccagactgcaaaaactaggagctcgcattcatttcccaagtgtgacccttagatgcttagttgactcgctgcatatttgctcttgtcttcagaaaagaaaggaagaagtatcgttccaacgaaatgtttccagaaaagtgtactataaactttcattccaaaaatggtgtcataagcaaacaactcacttgtcaaatttcaaatggtattgaacaaaaaaagaaagctgttgtgtttttgttttgttttgttttcatgaaactgtgattttcaacttatgaatgctataatgtcccagcgcgggaagctcacgctgtgtgaacatgaagttgtataaaacaaaccaaccaacctacacacaaatgttttcataggcactgtataaagaaaaatgtatgtttattaactcaaatcagtttttcagagaggaaacgtcactgagatgaagaggcgggtaaattggtttgttattttttaaaaaaaacttgcatgtttaaaaaaaagttgattgcttcaaatttctgctactaacttcaagctatgggagtttggcagtagtcacttgaggattttttttccaattcttttctttttgttgttaaagctgtacttcagtgaacagaaaaattgccaagcaaactaatggctataaaagcgtaatttgcatgtgtgggcataaactacagagcctcattgccatgaggtattgtacaaagttttaatacattttgtaaataaaattgtaaagaaagaa

SEQ ID NO: 30358 - protein, 894 aa, Homo sapiens
MARQKKMGQSVLRAVFFLVLGLLGHSHGGFPNTISIGGLFMRNTVQEHSAFRFAVQLYNTNQNTTEKPFHLNYHVDHLDSSNSFSVTNAFCSQFSRGVYAIFGFYDQMSMNTLTSFCGALHTSFVTPSFPTDADVQFVIQMRPALKGAILSLLGHYKWEKFVYLYDTERGFSILQAIMEAAVQNNWQVTARSVGNIKDVQEFRRIIEEMDRRQEKRYLIDCEVERINTILEQVVILGKHSRGYHYMLANLGFTDILLERVMHGGANITGFQIVNNENPMVQQFIQRWVRLDEREFPEAKNAPLKYTSALTHDAILVIAEAFRYLRRQRVDVSRRGSAGDCLANPAVPWSQGIDIERALKMVQVQGMTGNIQFDTYGRRTNYTIDVYEMKVSGSRKAGYWNEYERFVPFSDQQISNDSASSENRTIVVTTILESPYVMYKKNHEQLEGNERYEGYCVDLAYEIAKHVRIKYKLSIVGDGKYGARDPETKIWNGMVGELVYGRADIAVAPLTITLVREEVIDFSKPFMSLGISIMIKKPQKSKPGVFSFLDPLAYEIWMCIVFAYIGVSVVLFLVSRFSPYEWHLEDNNEEPRDPQSPPDPPNEFGIFNSLWFSLGAFMQQGCDISPRSLSGRIVGGVWWFFTLIIISSYTANLAAFLTVERMVSPIESAEDLAKQTEIAYGTLDSGSTKEFFRRSKIAVYEKMWSYMKSAEPSVFTKTTADGVARVRKSKGKFAFLLESTMNEYIEQRKPCDTMKVGGNLDSKGYGVATPKGSALRTPVNLAVLKLSEQGILDKLKNKWWYDKGECGAKDSGSKDKTSALSLSNVAGVFYILVGGLGLAMMVALIEFCYKSRAESKRMKLTKNTQNFKPAPATNTQNYATYREGYNVYGTESVKI

SEQ ID NO: 30359 - DNA, 2830 bp, Homo sapiens
attatgtcaccgctcaactctggcaaatggtgtttatcaaggctggcagaggaataaattatgcttgtgtttactcttttgttcccatggccaagtgctgttttattaattgttgaacaccattttgaggcactaaggaacgtaaggagtcaagatgaaaggacatttaggtgaggatcaagactgttaacagaggcacaatctaccgtcttgctggtcattgcaaaacattagccagttgccagaattgagtcataacacttacatcaatgtttagttattttacaatttagaactcccctgtactgttgtaatatattataatgttccattgcctttgttttccccaagatctaatcacgttgttcatttctcttaggacaagaccagcgctctgagcctgagcaatgtggcaggcgttttctatatacttgtcggaggtctggggctggccatgatggtggctttgatagaattctgttacaaatcacgggcagagtccaaacgcatgaaactcacaaagaacacccaaaactttaagcctgctcctgccaccaacactcagaattatgctacatacagagaaggctacaacgtgtatggaacagagagtgttaagatctagggatcccttcccactggaggcatgtgatgagaggaaatcaccgaaaacgtggctgcttcaaggatcctgagccagatttcactctccttggtgtcgggcatgacacgaatattgctgatggtgcaatgacctttcaataggaaaaactgatttttttttccttcagtgccttatggaacactctgagactcgcgacaatgcaaaccatcattgaaatctttttgctttgcttgaaaaaaaataattaaaataaaaaccaacaaaaatggacatgcaagattccagtatgcgaaaaaaaatcttattaagtcaattcaacaaaagccattctttgataccactgcagagtatataaacaccatgttctttaatacacacacacacacacacacacacacacacacacatttaaattccaattcagcaaagaggcccatctaagctaaaaaaattaattcttcctgattaaaaagaaaaaatctgtctcccagtgtttgggaagacggactggcatttcttctaggatctgctgaccagatgtttttggtatttcctgttggtggtgatgttctgtgcactctatttcctttcaatgttgctgaaatgtgtatatctttagaatgtaaatgcaacacttaagaaaattcaaacactttggaaaagggactaaacagtgatttctctgtgttcttgaaatggttttgtgaaaatgctttgataacttcccactcaaagaagagatttacagagctttcgaaattgactttgtgtgtagcaagggacggggcactatcaggatacctcttggtgctttcctaaaatggatcccggggctttccaaggagcctggaatttcagctcacagatctgtttttcttgcttcagtgtgcattttaagtcaatagagctgagtatctagcattgaggtgagggaaatgctgcctatactcccagatgtgtttagaatatctcagaaacaacactgtgtttagctcggctttctctgctaagtatgcctttcaagtgtacaccacggagacaggaccgcgttgcaaggcgggacagcaggttcagaccacagttctcagtctgactttactcttgctaggtctgtcctactagctgttgcctgctaccgcccatggctctccatcggactgcatgtgtccttttctagtttgcaaagactaaaatgcattcccaaacctactgctaatctgagggcctcagcatcacttccagatccttgcttggagcagtctctctattgactctctcagatcgctccactgctccatgggctatcaagtaactaactgcatacctgccgttggcatcatcagaacagtccgaagaaatagtctccactcactaattacctcctatataacgacgtatgcttcctgtagttcagtagtttgctctcatcgataacgtgcattgggaagtttccagactgcaaaaactaggagctcgcattcatttcccaagtgtgacccttagatgcttagttgactcgctgcatatttgctcttgtcttcagaaaagaaaggaagaagtatcgttccaacgaaatgtttccagaaaagtgtactataaactttcattccaaaaatggtgtcataagcaaacaactcacttgtcaaatttcaaatggtattgaacaaaaaaagaaagctgttgtgtttttgttttgttttgttttcatgaaactgtgattttcaacttatgaatgctataatgtcccagcgcgggaagctcacgctgtgtgaacatgaagttgtataaaacaaaccaaccaacctacacacaaatgttttcataggcactgtataaagaaaaatgtatgtttattaactcaaatcagtttttcagagaggaaacgtcactgagatgaagaggcgggtaaattggtttgttattttttaaaaaaaacttgcatgtttaaaaaaaagttgattgcttcaaatttctgctactaacttcaagctatgggagtttggcagtagtcacttgaggattttttttccaattcttttctttttgttgttaaagctgtacttcagtgaacagaaaaattgccaagcaaactaatggctataaaagcgtaatttgcatgtgtgggcataaactacagagcctcattgccatgaggtattgtacaaagttttaatacattttgtaaataaaattgtaaagaaagaa

SEQ ID NO: 30360 - protein, 41 aa, Homo sapiens
MLHTEKATTCMEQRVLRSRDPFPLEACDERKSPKTWLLQGS

SEQ ID NO: 30361 - DNA, 5553 bp, Homo sapiens
acatccgggcttctgctactagtgagaggaagatggcggccgcggctgtggtggttcccgcagagtggataaagaactgggagaaatcagggagaggcgaattagatttccagcaagctctctatgagttgtcatatcatgtaattaaaggaaatctaaagcatgaacaggcatctaatgttcttagtgacattagtgaatttcgtgaggatatgccctccattcttgctgatgtattctgcatattagacattgagacaaattgtttagaagaaaaaagcaagagagactattttacacagttggtattagcatgtttgtatttagtttcagacacagttctaaaggaacgcctggatccagaaacactggaatcattagggcttatcaaacaatcacagcaattcaatcaaaagtcagttaaaatcaagacaaaactcttttataagcagcaaaaattcaatttgttaagagaagagaatgaaggttatgccaagctgattgctgaattggggcaagatttatctggaagtattactagtgatttaatcttagaaaatatcaaatctttaataggatgctttaatctggatcccaatagagttttggatgtcattttagaagtgtttgaatgcaggccagaacacgatgacttctttatatctttgttagaatcttacatgagtatgtgtgaaccgcaaacactgtgtcatattcttgggttcaaattcaagttttaccaggaaccaaatggcgagacaccatcatctttatacagagttgcagcagtacttctacaatttaatcttattgatttagatgatctttatgtacatcttcttccggctgataattgcattatggatgaacacaaacgagaaattgcggaagctaagcaaattgttagaaagcttacgatggttgtgttgtcttctgaaaaaatggatgagcgagagaaagaaaaggaaaaagaagaggagaaagtagagaaaccacctgataaccaaaaacttggcttgttggaagccttattaaagattggtgattggcaacatgcacagaacattatggatcagatgcctccatactatgcagcttcacacaagctaatagcccttgctatttgcaagctcattcatataactattgagcctctctaccgaagagttggagttcctaaaggtgctaaaggctcacctgttaatgctttgcaaaacaagagagcaccaaaacaagctgagagctttgaagatttgaggagagacgtgttcaatatgttctgttaccttggtcctcacctttctcacgatcccattttatttgcaaaagtggtgcgcataggcaagtcatttatgaaggagtttcagtctgatggaagcaaacaagaagataaagaaaaaacggaagttatccttagctgtttgcttagcattactgaccaggtactacttccatctctttctttgatggactgcaatgcttgtatgtctgaggaactatggggaatgtttaaaacatttccatatcagcatagatatcgtctgtatggccagtggaagaatgaaacttataacagtcacccacttttagtaaaagttaaagctcaaacaatagacagagccaaatatatcatgaagcgcctaaccaaggaaaatgtgaagccttctggaagacaaattgggaagttgagccacagcaatccaaccattttgtttgattatatcttgtcacaaatacagaagtatgataacttaataacacctgtagtagattcattgaaatacctcacttcactgaattatgatgtcttggcctattgtatcattgaagctttagctaatccagaaaaggaaagaatgaaacatgatgacacaaccatctcaagctggcttcagagtctggctagtttctgtggtgcagtttttcgtaaatatccaattgatcttgctggtcttcttcagtatgttgccaatcagctaaaggcgggcaaaagttttgacctgcttatattgaaagaagtggtacaaaaaatggcaggaatagaaattacagaggaaatgacaatggagcaactagaggctatgactggtggagagcagctaaaagctgagggtggttattttggtcagatcagaaacactaaaaaatcctctcagagattaaaggatgctctattggaccatgatcttgcccttcctctctgtctgcttatggctcagcagagaaatggggtaatctttcaggaaggtggagagaaacatttgaaacttgtgggaaagctctatgaccagtgtcatgataccctggtgcagtttggtgggtttttagcatctaatctgagcacagaagattatataaagcgagtgccttcaattgatgtactctgtaatgaatttcatacaccccatgatgcagcatttttcctgtctaggccaatgtatgcccatcatatttcgtcaaagtatgatgaacttaaaaaatcagaaaagggaagtaaacagcaacataaagttcataagtacattacatcatgtgagatggtgatggcgcctgtccatgaagcagtggtctccttacatgtttccaaagtctgggatgacatcagccctcaattctatgctacattctggtcattgacaatgtatgaccttgcagttccacacaccagctatgaacgagaagtcaataaacttaaagtccagatgaaagcaattgatgacaatcaggaaatgcccccaaataaaaagaaaaaagagaaggagcgctgtactgcccttcaggacaagcttcttgaagaagaaaagaaacagatggaacatgtacagagagttctacagagattgaaactggaaaaggacaactggcttttagcaaaatctaccaaaaatgagaccatcacaaaatttctacagctgtgtatatttcctcgatgtattttttcagcaattgatgctgtttactgtgctcgttttgttgaattggtacatcaacagaaaactccaaatttttccacacttctttgctatgatcgagttttctctgacataatttacacagttgcaagctgtactgaaaatgaagccagtcgatacggaaggtttctttgctgcatgttagagactgtgaccaggtggcatagtgatagagccacatatgaaaaggaatgtggaaactatccaggattccttaccatattacgggcaactggatttgatggtggaaataaggctgatcaattagactatgaaaattttcgacatgttgtacataaatggcattacaaactaaccaaggcatcggtacattgccttgaaacaggcgaatatactcacatcaggaatatcttgattgtgctaacaaaaatacttccttggtacccaaaagttttgaatctgggtcaagctttggaaagaagagtacacaaaatctgccaagaagaaaaagagaagaggccagatctatatgcattggctatgggctactctgggcagttgaaaagtagaaagtcatacatgatacctgaaaatgagtttcatcacaaagacccccctccgaggaatgcagttgccagtgtgcaaaatgggcctggtggtgggccttcttcatcatcaataggaagtgcatctaaatcggatgaaagcagtactgaggagactgataaatcaagggagagatctcagtgtggtgtgaaagctgttaataaagcttctagtaccacacctaaagggaattcaagcaatggaaatagtggctctaacagcaacaaagctgttaaagaaaatgacaaagaaaaagggaaagagaaagaaaaagagaaaaaagaaaagactccagctactactccagaggccagggtacttggtaaagatggtaaagaaaaaccaaaggaagagcggccaaataaagatgaaaaagcaagagagaccaaggaaagaacgccgaagtctgacaaagagaaagaaaaattcaagaaggaagaaaaagctaaagatgagaaatttaagaccactgtccccaacgcagaatcaaaatcaactcaagaaagggaaagagagaaggagccatccagagaaagagatatagcaaaggaaatgaaatcaaaggaaaatgttaaaggaggagaaaaaacaccagtttctgggtccttgaaatcacctgttcccagatcagatattccagagcctgaaagggaacaaaaacgccgcaaaattgatactcacccttctccatcacattcctccacagtaaaggacagtctcatcgaactcaaggaatcttcagcaaagctctacattaatcatactcctccaccactgtccaagagtaaggagagagaaatggacaagaaagatttggacaagtcaagggaaagatccagagaaagagagaaaaaagatgaaaaggacaggaaagagcggaaaagggatcactcaaacaacgaccgtgaagtgccaccggacttaaccaagagacgtaaagaggagaatggaacaatgggggtttcaaaacataaaagtgaaagtccttgtgaatctccttatccaaatgagaaagacaaggaaaaaaataagtcaaaatcttcaggcaaagaaaaaggcagtgattcatttaaatctgagaagatggataaaatctcctccggtggcaaaaaggagtccaggcatgataaagaaaagatagaaaagaaagagaaacgggacagttcaggaggaaaggaagagaagaaacatcataagtcctcggacaagcacagataatgaagactttccatcaaggtgagatcggactggaactgttcggctgcgaccagaaatttattttcctgagtaaattgccgagaattaagaatgaagagggccatttgcatctccttaaattattcagttacctgctttattgctccatgtggaaaacttaaaattgttaagttgtgcattactgtattttaacttgttgcttagtttctacatgtttattttcagtaatggctgaaagtgttaactgttccatacttttagcacaatgtgctgcataaggttacctgtgtacagagttttactttagattaactaaatattgcctgggttcagtttttatttccattctgaaatgcttcctttttattgtttgaaactgaaaataaacaattgttgaacccttttgattttacctcattttaaaactgttttaatttattatttggcttgttcttaatattagtcactaaaagcagtgggagcattgtcttatgaaatgcttaggaatcattttatatagtacatgtacaacattaaacgtgtttaaaaaagaaaaaggtaccagcgatcacttgtcccttgccattttttcttgtaattatgttagacaaatcttggcggcggggggatcaaaacataattgttttaattctacagctgtaggagctttgtattgctgaactttcatctggaaaagtttcacagtgacatttttaaaagagaatttttttatctgccgaattctaccagtgtaaccttttttctaaataaacaatagttttctcaaatggttgta

SEQ ID NO: 30362 - protein, 1574 aa, Homo sapiens
MAAAAVVVPAEWIKNWEKSGRGELDFQQALYELSYHVIKGNLKHEQASNVLSDISEFREDMPSILADVFCILDIETNCLEEKSKRDYFTQLVLACLYLVSDTVLKERLDPETLESLGLIKQSQQFNQKSVKIKTKLFYKQQKFNLLREENEGYAKLIAELGQDLSGSITSDLILENIKSLIGCFNLDPNRVLDVILEVFECRPEHDDFFISLLESYMSMCEPQTLCHILGFKFKFYQEPNGETPSSLYRVAAVLLQFNLIDLDDLYVHLLPADNCIMDEHKREIAEAKQIVRKLTMVVLSSEKMDEREKEKEKEEEKVEKPPDNQKLGLLEALLKIGDWQHAQNIMDQMPPYYAASHKLIALAICKLIHITIEPLYRRVGVPKGAKGSPVNALQNKRAPKQAESFEDLRRDVFNMFCYLGPHLSHDPILFAKVVRIGKSFMKEFQSDGSKQEDKEKTEVILSCLLSITDQVLLPSLSLMDCNACMSEELWGMFKTFPYQHRYRLYGQWKNETYNSHPLLVKVKAQTIDRAKYIMKRLTKENVKPSGRQIGKLSHSNPTILFDYILSQIQKYDNLITPVVDSLKYLTSLNYDVLAYCIIEALANPEKERMKHDDTTISSWLQSLASFCGAVFRKYPIDLAGLLQYVANQLKAGKSFDLLILKEVVQKMAGIEITEEMTMEQLEAMTGGEQLKAEGGYFGQIRNTKKSSQRLKDALLDHDLALPLCLLMAQQRNGVIFQEGGEKHLKLVGKLYDQCHDTLVQFGGFLASNLSTEDYIKRVPSIDVLCNEFHTPHDAAFFLSRPMYAHHISSKYDELKKSEKGSKQQHKVHKYITSCEMVMAPVHEAVVSLHVSKVWDDISPQFYATFWSLTMYDLAVPHTSYEREVNKLKVQMKAIDDNQEMPPNKKKKEKERCTALQDKLLEEEKKQMEHVQRVLQRLKLEKDNWLLAKSTKNETITKFLQLCIFPRCIFSAIDAVYCARFVELVHQQKTPNFSTLLCYDRVFSDIIYTVASCTENEASRYGRFLCCMLETVTRWHSDRATYEKECGNYPGFLTILRATGFDGGNKADQLDYENFRHVVHKWHYKLTKASVHCLETGEYTHIRNILIVLTKILPWYPKVLNLGQALERRVHKICQEEKEKRPDLYALAMGYSGQLKSRKSYMIPENEFHHKDPPPRNAVASVQNGPGGGPSSSSIGSASKSDESSTEETDKSRERSQCGVKAVNKASSTTPKGNSSNGNSGSNSNKAVKENDKEKGKEKEKEKKEKTPATTPEARVLGKDGKEKPKEERPNKDEKARETKERTPKSDKEKEKFKKEEKAKDEKFKTTVPNAESKSTQEREREKEPSRERDIAKEMKSKENVKGGEKTPVSGSLKSPVPRSDIPEPEREQKRRKIDTHPSPSHSSTVKDSLIELKESSAKLYINHTPPPLSKSKEREMDKKDLDKSRERSREREKKDEKDRKERKRDHSNNDREVPPDLTKRRKEENGTMGVSKHKSESPCESPYPNEKDKEKNKSKSSGKEKGSDSFKSEKMDKISSGGKKESRHDKEKIEKKEKRDSSGGKEEKKHHKSSDKHR

SEQ ID NO: 30363 - DNA, 956 bp, Homo sapiens
ggaatatcttgattgtgctaacaaaaatacttccttggtacccaaaagttttgaatctgggtcaagctttggaaagaagagtacacaaaatctgccaagaagaaaaagagaagaggccagatctatatgcattggctatggggtaacaaaattatattttaatgtgatttacaagactagatgacagaaggattctgaagactttaaaatgttttacagtgttgaagtttatcttctgccttcaggagattatgggagattatgcgatcatgtttccacaggctggtgagagttaccacttctgattatcaacttccggtctatactggatgatagtttttttaaagtcatgtataatatttcttgattgggaggaaatataattttatcatcatagttaacagatcttcaagagtaaaaaaaaaaagccatcttagtttaaggattagtttatagtgaaattgtaatttttaagaaagctgggcgttctataaaaaccttcaagaacttattaaaaattggtattttttaattctctagaaccacatagtagaatgaataacttgctaattttattcttaaaaacctcatgtttatgttttttgatttgtgtttgtatatttaaacactttgtgcgactttcagctactctgggcagttgaaaagtagaaagtcatacatgatacctgaaaatgagtttcatcacaaagacccccctccgaggaatgcagttgccagtgtgcaaaatgggcctggtggtgggccttcttcatcatcaataggaagtgcatctaaatcggatgaaagcagtactgaggagactgataaatcaagggagagatctcagtgtggtgtgaaagctgttaataaagcttctagtaccacacctaaagggaattcaagcaatggaaatagtggctctaacagcaacaaagctgttaaagaaaatgacaaag

SEQ ID NO: 30364 - protein, 91 aa, Homo sapiens
MIPENEFHHKDPPPRNAVASVQNGPGGGPSSSSIGSASKSDESSTEETDKSRERSQCGVKAVNKASSTTPKGNSSNGNSGSNSNKAVKEND

SEQ ID NO: 30365 - DNA, 3392 bp, Homo sapiens
caacagatttccagcaagctctctatgagttgtcatatcatgtaattaaaggaaatctaaagcatgaacaggcatctaatgttcttagtgacattagtgaatttcgtgaggatatgccctccattcttgctgatgtattctgcatattagacattgagacaaattgtttagaagaaaaaagcaagagagactattttacacagttggtattagcatgtttgtatttagtttcagacacagttctaaaggaacgcctggatccagaaacactggaatcattagggcttatcaaacaatcacagcaattcaatcaaaagtcagttaaaatcaagacaaaactcttttataagcagcaaaaattcaatttgttaagagaagagaatgaaggttatgccaagctgattgctgaattggggcaagatttatctggaagtattactagtgatttaatcttagaaaatatcaaatctttaataggatgctttaatctggatcccaatagagttttggatgtcattttagaagtgtttgaatgcaggccagaacacgatgacttctttatatctttgttagaatcttacatgagtatgtgtgaaccgcaaacactgtgtcatattcttgggttcaaattcaagttttaccaggaaccaaatggcgagacaccatcatctttatacagagttgcagcagtacttctacaatttaatcttattgatttagatgatctttatgtacatcttcttccggctgataattgcattatggatgaacacaaacgagaaattgcggaagctaagcaaattgttagaaagcttacgatggttgtgttgtcttctgaaaaaatggatgagcgagagaaagaaaaggaaaaagaagaggagaaagtagagaaaccacctgataaccaaaaacttggcttgttggaagccttattaaagattggtgattggcaacatgcacagaacattatggatcagatgcctccatactatgcagcttcacacaagctaatagcccttgctatttgcaagctcattcatataactattgagcctctctaccgaagagttggagttcctaaaggtgctaaaggctcacctgttaatgctttgcaaaacaagagagcaccaaaacaagctgagagctttgaagatttgaggagagacgtgttcaatatgttctgttaccttggtcctcacctttctcacgatcccattttatttgcaaaagtggtgcgcataggcaagtcatttatgaaggagtttcagtctgatggaagcaaacaagaagataaagaaaaaacggaagttatccttagctgtttgcttagcattactgaccaggtactacttccatctctttctttgatggactgcaatgcttgtatgtctgaggaactatggggaatgtttaaaacatttccatatcagcatagatatcgtctgtatggccagaaagaatgaaacatgatgacacaaccatctcaagctggcttcagagtctggctagtttctgtggtgcagtttttcgtaaatatccaattgatcttgctggtcttcttcagtatgttgccaatcagctaaaggcgggcaaaagttttgacctgcttatattgaaagaagtggtacaaaaaatggcaggaatagaaattacagaggaaatgacaatggagcaactagaggctatgactggtggagagcagctaaaagctgagggtggttattttggtcagatcagaaacactaaaaaatcctctcagagattaaaggatgctctattggaccatgatcttgcccttcctctctgtctgcttatggctcagcagagaaatggggtaatctttcaggaaggtggagagaaacatttgaaacttgtgggaaagctctatgaccagtgtcatgataccctggtgcagtttggtgggtttttagcatctaatctgagcacagaagattatataaagcgagtgccttcaattgatgtactctgtaatgaatttcatacaccccatgatgcagcatttttcctgtctaggccaatgtatgcccatcatatttcgtcaaagtatgatgaacttaaaaaatcagaaaagggaagtaaacagcaacataaagttcataagtacattacatcatgtgagatggtgatggcgcctgtccatgaagcagtggtctccttacatgtttccaaagtctgggatgacatcagccctcaattctatgctacattctggtcattgacaatgtatgaccttgcagttccacacaccagctatgaacgagaagtcaataaacttaaagtccagatgaaagcaattgatgacaatcaggaaatgcccccaaataaaaagaaaaaagagaaggagcgctgtactgcccttcaggacaagcttcttgaagaagaaaagaaacagatggaacatgtacagagagttctacagagattgaaactggaaaaggacaactggcttttagcaaaatctaccaaaaatgagaccatcacaaaatttctacagctgtgtatatttcctcgatgtattttttcagcaattgatgctgtttactgtgctcgttttgttgaattggtacatcaacagaaaactccaaatttttccacacttctttgctatgatcgagttttctctgacataatttacacagttgcaagctgtactgaaaatgaagccagtcgatacggaaggtttctttgctgcatgttagagactgtgaccaggtggcatagtgatagagccacatatgaaaaggaatgtggaaactatccaggattccttaccatattacgggcaactggatttgatggtggaaataaggctgatcaattagactatgaaaattttcgacatgttgtacataaatggcattacaaactaaccaaggcatcggtacattgccttgaaacaggcgaatatactcacatcaggaatatcttgattgtgctaacaaaaatacttccttggtacccaaaagttttgaatctgggtcaagctttggaaagaagagtacacaaaatctgccaagaagaaaaagagaagaggccagatctatatgcattggctatgggctactctgggcagttgaaaagtagaaagtcatacatgatacctgaaaatgagtttcatcacaaagacccccctccgaggaatgcagttgccagtgtgcaaaatgggcctggtggtgggccttcttcatcatcaataggaagtgcatctaaatcggatgaaagcagtactgaggagactgataaatcaagggagagatctcagtgtggtgtgaaagctgttaataaagcttctagtaccacacctaaagggaattcaagcaatggaaatagtggctctaacagcaacaaagctgttaaagaaaatgacaaag

SEQ ID NO: 30366 - protein, 643 aa, Homo sapiens
MKHDDTTISSWLQSLASFCGAVFRKYPIDLAGLLQYVANQLKAGKSFDLLILKEVVQKMAGIEITEEMTMEQLEAMTGGEQLKAEGGYFGQIRNTKKSSQRLKDALLDHDLALPLCLLMAQQRNGVIFQEGGEKHLKLVGKLYDQCHDTLVQFGGFLASNLSTEDYIKRVPSIDVLCNEFHTPHDAAFFLSRPMYAHHISSKYDELKKSEKGSKQQHKVHKYITSCEMVMAPVHEAVVSLHVSKVWDDISPQFYATFWSLTMYDLAVPHTSYEREVNKLKVQMKAIDDNQEMPPNKKKKEKERCTALQDKLLEEEKKQMEHVQRVLQRLKLEKDNWLLAKSTKNETITKFLQLCIFPRCIFSAIDAVYCARFVELVHQQKTPNFSTLLCYDRVFSDIIYTVASCTENEASRYGRFLCCMLETVTRWHSDRATYEKECGNYPGFLTILRATGFDGGNKADQLDYENFRHVVHKWHYKLTKASVHCLETGEYTHIRNILIVLTKILPWYPKVLNLGQALERRVHKICQEEKEKRPDLYALAMGYSGQLKSRKSYMIPENEFHHKDPPPRNAVASVQNGPGGGPSSSSIGSASKSDESSTEETDKSRERSQCGVKAVNKASSTTPKGNSSNGNSGSNSNKAVKEND

SEQ ID NO: 30367 - DNA, 1538 bp, Homo sapiens
ggcagccaacgacgtggagactcgcgggcccctttgcgaggttactacacgggttgcgccctccgaagtcttcggccttacttcccattagaacagagaaatgccatccacaggccaacaatctccctctgatgccgagccaaagctggactgtactgccatctcggctcactgcaacctccctgcctgattctcctgcctcagcctgccgagtgcctgcgattgcaggtgcgcgccgccacgcctgactgtttttcgtatttttttggtggagacggggtttcgctgtgttggccgggctggtctccagctcctaaccgcgagtgatccgccagcctcggcctcccgaggtgccgggattgcagacggagtctcgttcactcagtgctcaatggtgcccaggctggggtgcagtggcgtgatctcggctcgctgcaacctccacctcccagccgcctgccttggcctcccaaagtgccgagattgcagcctttgcccggccgccaccccgtctgggaagtgaggagcctctctgcctggccgcccatcgtctgggatgtgaggagcccctctgcctggctgcccagtctggaaagtgaggagcgtctctgcccggccgccatcctgtctaggaagtgaggagcgtctctgcccggctgcccatcgtctgggatgaagtgaggagcgtctctgcctggccgcccatcgtctgagatgtggggagtgcctctgccccgccgccccgtctgggatgtgaggagcgcctctgcccggccgcgaccccgtctgggaggtgaagagcgtctctgcccggccgccccgtctgagaagtgaggagaccctccgcccggcagccgccccgtctgagaggtgaagagcgtctccgcccggccggccgccccgtccgggagggaggtgggggggtcggccccccgcccggccggccgccccgtccgggaggtgacgggcgcctctgcccggccgccgctactgggaagtgaggagcccctctgcccggccaccacccggtctgggaggtgtacccaacagctcattgagaacgggccatgatgacaatggcggttttgtggaatagaaaagggggaaaggtggggaaaagattgagaaatcggatggttgctgtgtctgtgtagaaagaggtagacatgggagacttttcattttgttctgtactaagaaaaattcttctgccttgggatcctgttgatctatgaccttacccccaaccctgcgctctctgaaacatgtgctgtgtccactcagggttaaatggattaagggcggtgcaagatgggctttgttaaacagatgcttgaaggcggcaggctcgttaagagtcattaccactccctagtctcaagtacccagggacacaaacactgcagaaggccgcagggtcctctgcctaggaaaaccagagatctttgttcacttgtttatctgctgaccttccctccactattgtcctatgaccctgccaaatccccctctgcgagaaacacccaagaatgatcaat

SEQ ID NO: 30368 - protein, 73 aa, Homo sapiens
MGFVKQMLEGGRLVKSHYHSLVSSTQGHKHCRRPQGPLPRKTRDLCSLVYLLTFPPLLSYDPAKSPSARNTQE

SEQ ID NO: 30369 - DNA, 1709 bp, Homo sapiens
acggatcgaaggcatttgtgaggaggcgcgaatcaagttagcggggggaagagtcttagacctggccagtcctcagggtgagggccctgaggaagaactgagggacctcccaccatagagagaagaaaccccggcctgtactgcgctgccgtgagactggtgctccaggaaccaggtggtgacgaactgggtgtgaggcacacagcctaaagtcagcacagcagaggaggcccaggcagtgccaggagtcaaggcctgttggatctcatcatccatatccctgttgatacgtttacctgctgctcctgaagaagtcgtcatgcctcccgttccaggcgttccattccgcaacgttgacaacgactccccgacctcagttgagttagaagactgggtagatgcacagcatcccacagatgaggaagggaggatacaggcacctgtcagggcctgccagacagtgagtcctctttcacatatacactagatgaaaaggtggccgagttagtggagttcctgctcctcaaatacgaagcagaggagcctgtaacagaggcagagatgctgatgattgtcatcaagtacaaagattactttcctgtgatactcaagagagcccgtgagttcatggagcttctttttggccttgccctgatagaagtgggccctgaccacttctgtgtgtttgcaaacacagtaggcctcaccgatgagggtagtgatgatgagggcatgcccgagaacagcctcctgattattattctgagtgtgatcttcataaagggcaactgtgcctctgaggaggtcatctgggaagtgctgaatgcagtaggggtatatgctgggagggagcacttcgtctatggggagcctagggagctcctcactaaagtttgggtgcagggacattacctggagtatcgggaggtgccccacagttctcctccatattatgaattcctgtggggtccgagagcccattcagaaagcatcaagaagaaagtactagagtttttagccaagctgaacaacactgttcctagttcctttccatcctggtacaaggatgctttgaaagatgtggaagagagagtccaggccacaattgataccgcagatgatgccactgtcatggccagtgaaagcctcagtgtcatgtccagcaacgtctccttttctgagtgaagtctaggatagtttcttccccttgtgtttgaacagggcagtttaggttctaggtagtggagggccaggtggggctcgaggaacgtagtgttctttgcatttctgtcccatatgggtgatgtagagatttacctgtttttcagtattttctaaatgcttttcctttgaatagcaggtagttagcttcagagtgttaatttatgaatattagtcgcacatgtattgctctttatctggtttaagagtaacagtttgatattttgttaaaaaaatggaaataccttctcccttattttgtgatctgtaacagggtagtgtggtattgtaataggcatttttttttttttttacaatgtgcaataactcagcagttaaatagtggaacaaaattgaagggtggtcagtagtttcatttccttgtcctgcttattcttttgttcttgaaaattatatatacctggctttgcttagcttgttgaagaaagtagcagaaattaaatcttaataaaagaaagccccactga

SEQ ID NO: 30370 - protein, 55 aa, Homo sapiens
MPPVPGVPFRNVDNDSPTSVELEDWVDAQHPTDEEGRIQAPVRACQTVSPLSHIH

SEQ ID NO: 30371 - DNA, 1994 bp, Homo sapiens
gctttcccgacggccatcttgggaatctgacggatcgaaggcatttgtgaggaggcgcgaatcaagttagcggggggaagagtcttagacctggccagtcctcagggtgagggccctgaggaagaactgagggacctcccaccatagagagaagaaaccccggcctgtactgcgctgccgtgagactggtgctccaggaaccaggtggtgacgaactgggtgtgaggcacacagcctaaagtcagcacagcagaggaggcccaggcagtgccaggagtcaaggcctgttggatctcatcatccatatccctgttgatacgtttacctgctgctcctgaagaagtcgtcatgcctcccgttccaggcgttccattccgcaacgttgacaacgactccccgacctcagttgagttagaagactgggtagatgcacagcatcccacagatgaggaagaggaggaagcctcctccgcctcttccactttgtacttagtattttccccctcttctttctccacatcctcttctctgattcttggtggtcctgaggaggaggaggtgccctctggtgtgataccaaatcttaccgagagcattcccagtagtcctccacagggtcctccacagggtccttcccagagtcctctgagctcctgctgctcctctttttcatggagctcattcagtgaggagtccagcagccagaaaggggaggatacaggcacctgtcagggcctgccagacagtgagtcctctttcacatatacactagatgaaaaggtggccgagttagtggagttcctgctcctcaaatacgaagcagaggagcctgtaacagaggcagagatgctgatgattgtcatcaagtacaaagattactttcctgtgatactcaagagagcccgtgagttcatggagcttctttttggccttgccctgatagaagtgggccctgaccacttctgtgtgtttgcaaacacagtaggcctcaccgatgagggtagtgatgatgagggcatgcccgagaacagcctcctgattattattctgagtgtgatcttcataaagggcaactgtgcctctgaggaggtcatctgggaagtgctgaatgcagtaggggtatatgctgggagggagcacttcgtctatggggagcctagggagctcctcactaaagtttgggtgcagggacattacctggagtatcgggaggtgccccacagttctcctccatattatgaattcctgtggggtccgagagcccattcagaaagcatcaagaagaaagtactagagtttttagccaagctgaacaacactgttcctagttcctttccatcctggtacaaggatgctttgaaagatgtggaagagagagtccaggccacaattgataccgcagatgatgccactgtcatggccagtgaaagcctcagtgtcatgtccagcaacgtctccttttctgagtgaagtctaggatagtttcttccccttgtgtttgaacagggcagtttaggttctaggtagtggagggccaggtggggctcgaggaacgtagtgttctttgcatttctgtcccatatgggtgatgtagagatttacctgtttttcagtattttctaaatgcttttcctttgaatagcaggtagttagcttcagagtgttaatttatgaatattagtcgcacatgtattgctctttatctggtttaagagtaacagtttgatattttgttaaaaaaatggaaataccttctcccttattttgtgatctgtaacagggtagtgtggtattgtaataggcatttttttttttttttacaatgtgcaataactcagcagttaaatagtggaacaaaattgaagggtggtcagtagtttcatttccttgtcctgcttattcttttgttcttgaaaattatatatacctggctttgcttagcttgttgaagaaagtagcagaaattaaatcttaataaaagaaagccccactga

SEQ ID NO: 30372 - protein, 373 aa, Homo sapiens; identical to SEQ ID NO: 4257

SEQ ID NO: 30373 - DNA, 438 bp, Homo sapiens
aattcagtatggcaaaggtgaccagtgagccacagaagcctaatgaagatgtggacgaacagaccccatcaacctcaagtaccaaagggaggaagaaggggaagacaccccgtcaacgaaggtccagaagcggcgttaagggcctaaagaccaccaggaaggcgaaaagaccccttcgagggagctcgagccaaaaagccggtgaaactaacacccctgcaggaaaacctaagaaagctagaggaccaatactgcgtggtcgttatcaccggctgaaagaaaaaatgaagaaagaagaggccgacaaagagcaaagcgagacctcagttctgtgatgtctctagaggtccgccactgaaaagtcatcaatcatacagtcagtgaattctacaccaacaggttaaaaccatgaaaataaaatcaacctgaatcgaaagg

SEQ ID NO: 30374 - protein, 108 aa, Homo sapiens
MAKVTSEPQKPNEDVDEQTPSTSSTKGRKKGKTPRQRRSRSGVKGLKTTRKAKRPLRGSSSQKAGETNTPAGKPKKARGPILRGRYHRLKEKMKKEEADKEQSETSVL

SEQ ID NO: 30375 - DNA, 438 bp, Homo sapiens; identical to SEQ ID NO: 30373

SEQ ID NO: 30376 - protein, 108 aa, Homo sapiens; identical to SEQ ID NO: 30374

SEQ ID NO: 30377 - DNA, 843 bp, Homo sapiens
attcatatggagcatcacaccagctatctcctgctccctgtcctgcactgcaaaggaggccttttcatcctctctactgcctccaatttttctcacgaggaatgtgagaggaaaaccttttgtcagtttcaaatactcatgtatctgattgtcaatgctggagagctggggccagggcagtagttgatgaatatcacctgactgtctcctgcagaaaaagcattcccagaagcacggagaagtgaggagaaaaggcaatgcacctggagctggagaccaaggccctgttcttactgatggcccttggagcagatatttgaattggagagataaaaccgtggtttttggggtgttaattttggtggctgatgcattctgtgattgatttggctattacaactggtattgattttaaacacattaattgcaaaatctcaattgtgatttgatttctgtatttacaatactaaaaacgaggctttcgccaggagaagacaattggcagtactcagttggaagtgcttaattgttaatatatatcagccgtggttcttcagcgtcgtcagtgttgctcagtcttgctctttgtggcgactactgaatgcttgaaaaattctctcctatactcccactctgcactgtagaagagaaagagaggagagtggaagaaaaaagagagggagaggagaaagaaagagaggagagagaaacatgggcatggatgatacataaggtagttgtaaactgtgatcagctttgataataactagataaattcttttaatacaaaaatatataaggcattttgcctttttttcaaatttcaaataaatggatttgtat

SEQ ID NO: 30378 - protein, 58 aa, Homo sapiens
MEHHTSYLLLPVLHCKGGLFILSTASNFSHEECERKTFCQFQILMYLIVNAGELGPGQ

SEQ ID NO: 30379 - DNA, 21 bp, Homo sapiens
ccagctctcaraagtatgtgg

SEQ ID NO: 30380 - DNA, 21 bp, Homo sapiens
tgttgtgttcygttccttatg

SEQ ID NO: 30381 - DNA, 21 bp, Homo sapiens
tctggggccckcatatgtgta

SEQ ID NO: 30382 - DNA, 21 bp, Homo sapiens
agataggacawgtgttcctgg

SEQ ID NO: 30383 - DNA, 21 bp, Homo sapiens
ccttgactccrtcagctgaat

SEQ ID NO: 30384 - DNA, 21 bp, Homo sapiens
gggacatgccrgtactgcata

SEQ ID NO: 30385 - DNA, 21 bp, Homo sapiens
ttggaactaaytggaaaaatg

SEQ ID NO: 30386 - DNA, 21 bp, Homo sapiens
ctattagtcaytgacacttta

SEQ ID NO: 30387 - DNA, 21 bp, Homo sapiens
tgcagtgtttygattttataa

SEQ ID NO: 30388 - DNA, 21 bp, Homo sapiens
ggcagttgtamatttccagtg

SEQ ID NO: 30389 - DNA, 21 bp, Homo sapiens
catctgaggcrcccccaactc

SEQ ID NO: 30390 - DNA, 21 bp, Homo sapiens
tctatacaggyttgcatggcc

SEQ ID NO: 30391 - DNA, 21 bp, Homo sapiens
ttcgcaatcgrggatccatgt

SEQ ID NO: 30392 - DNA, 21 bp, Homo sapiens
catgaggaagrtcccggctca

SEQ ID NO: 30393 - DNA, 21 bp, Homo sapiens
actagatgccraagcacctac

SEQ ID NO: 30394 - DNA, 21 bp, Homo sapiens
agactgcagarcctggcgtat

SEQ ID NO: 30395 - DNA, 21 bp, Homo sapiens
aactgaagctmtttgtactct

SEQ ID NO: 30396 - DNA, 21 bp, Homo sapiens
accaggtgttyagagcctcct

SEQ ID NO: 30397 - DNA, 21 bp, Homo sapiens
tgatgtagaaygcaatatcac

SEQ ID NO: 30398 - DNA, 21 bp, Homo sapiens
cttagagaggkgcccagagct

SEQ ID NO: 30399 - DNA, 21 bp, Homo sapiens
gtttgtggaamtgatgacagc

SEQ ID NO: 30400 - DNA, 21 bp, Homo sapiens
tagttgtttgytagtgaaaga

SEQ ID NO: 30401 - DNA, 21 bp, Homo sapiens
caggcagcccrtggtggttgt

SEQ ID NO: 30402 - DNA, 21 bp, Homo sapiens
catcccacttraataaataat

SEQ ID NO: 30403 - DNA, 21 bp, Homo sapiens
cagatgcaagkcccataagat

SEQ ID NO: 30404 - DNA, 21 bp, Homo sapiens
ttgagtcaaayagcccttggg

SEQ ID NO: 30405 - DNA, 21 bp, Homo sapiens
ataattcctcwccagcatatg

SEQ ID NO: 30406 - DNA, 21 bp, Homo sapiens
cctatcttctygcccagccct

SEQ ID NO: 30407 - DNA, 21 bp, Homo sapiens
ctccctgcttyctctctgaga

SEQ ID NO: 30408 - DNA, 21 bp, Homo sapiens
actaatcaggrgagtaattaa

SEQ ID NO: 30409 - DNA, 21 bp, Homo sapiens
ctctggggctycggaccccgg

SEQ ID NO: 30410 - DNA, 21 bp, Homo sapiens
gggtggtcagyttttaagggc

SEQ ID NO: 30411 - DNA, 21 bp, Homo sapiens
gtggctttgakttggctctgc

SEQ ID NO: 30412 - DNA, 21 bp, Homo sapiens
tccaaagaccrtatccccaaa

SEQ ID NO: 30413 - DNA, 21 bp, Homo sapiens
agctgacagtyggttgatccc

SEQ ID NO: 30414 - DNA, 21 bp, Homo sapiens
caggttactgyggtgtgtgga

SEQ ID NO: 30415 - DNA, 21 bp, Homo sapiens
tttctctttayccttttctgt

SEQ ID NO: 30416 - DNA, 21 bp, Homo sapiens
cagttaccttmccacaaatga

SEQ ID NO: 30417 - DNA, 21 bp, Homo sapiens
agccagcaggrttgggagaaa

SEQ ID NO: 30418 - DNA, 21 bp, Homo sapiens
tcttaccttayctgtatggat

SEQ ID NO: 30419 - DNA, 21 bp, Homo sapiens
tgctgtaacaycacatagaaa

SEQ ID NO: 30420 - DNA, 21 bp, Homo sapiens
gaaagcccacrcagaccatac

SEQ ID NO: 30421 - DNA, 21 bp, Homo sapiens
gatattttccrtgaaggttca

SEQ ID NO: 30422 - DNA, 21 bp, Homo sapiens
gtgagtagagycgagtccaat

SEQ ID NO: 30423 - DNA, 21 bp, Homo sapiens
gtatctggcaygtagtaaaca

SEQ ID NO: 30424 - DNA, 21 bp, Homo sapiens
agtagtgccaygccaagccac

SEQ ID NO: 30425 - DNA, 21 bp, Homo sapiens
ccttaggtgcrgcagaagcca

SEQ ID NO: 30426 - DNA, 21 bp, Homo sapiens
acccagctttyatctcggctg

SEQ ID NO: 30427 - DNA, 21 bp, Homo sapiens
gggaggaaggwtgtttgaagc

SEQ ID NO: 30428 - DNA, 21 bp, Homo sapiens
attgcatttgyccttcatggc

SEQ ID NO: 30429 - DNA, 21 bp, Homo sapiens
acttcagcaasctgcttccct

SEQ ID NO: 30430 - DNA, 21 bp, Homo sapiens
atagaaatgakgatatatgta

SEQ ID NO: 30431 - DNA, 21 bp, Homo sapiens
acacccggccstgtggacaca

SEQ ID NO: 30432 - DNA, 21 bp, Homo sapiens
caaaccagagktccatctgtg

SEQ ID NO: 30433 - DNA, 21 bp, Homo sapiens
gatggaactaytggaatttct

SEQ ID NO: 30434 - DNA, 21 bp, Homo sapiens
tgtaggtgatkgtttcttcct

SEQ ID NO: 30435 - DNA, 21 bp, Homo sapiens
ctcatccgctyctgggagatt

SEQ ID NO: 30436 - DNA, 21 bp, Homo sapiens
aggtatttggwgcttaatttt

SEQ ID NO: 30437 - DNA, 21 bp, Homo sapiens
tgtattttctrttatcttgga

SEQ ID NO: 30438 - DNA, 21 bp, Homo sapiens
ggcatttccaktattgatgtt

SEQ ID NO: 30439 - DNA, 21 bp, Homo sapiens
aagggacaggrttaagttgct

SEQ ID NO: 30440 - DNA, 21 bp, Homo sapiens
gtgccatagaygttaagacag

SEQ ID NO: 30441 - DNA, 21 bp, Homo sapiens
tcccacaggastatcttccag

SEQ ID NO: 30442 - DNA, 21 bp, Homo sapiens
caggattgtaycttgaatcta

SEQ ID NO: 30443 - DNA, 21 bp, Homo sapiens
gactaatttcrtcggggaaaa

SEQ ID NO: 30444 - DNA, 21 bp, Homo sapiens
acttaagaacrggatagacaa

SEQ ID NO: 30445 - DNA, 21 bp, Homo sapiens
gtggagtaagyaatagggagc

SEQ ID NO: 30446 - DNA, 21 bp, Homo sapiens
atttgtgtcawtccacaaggc

SEQ ID NO: 30447 - DNA, 21 bp, Homo sapiens
agggttatcaygcctgcccca

SEQ ID NO: 30448 - DNA, 21 bp, Homo sapiens
ttgtctccagygtcaagaaac

SEQ ID NO: 30449 - DNA, 21 bp, Homo sapiens
tgtgataattmcatggcttac

SEQ ID NO: 30450 - DNA, 21 bp, Homo sapiens
cattgtgtaayattgatctag

SEQ ID NO: 30451 - DNA, 21 bp, Homo sapiens
ggatgattacrttacttccat

SEQ ID NO: 30452 - DNA, 21 bp, Homo sapiens
ggtttcttgayggattcaatt

SEQ ID NO: 30453 - DNA, 21 bp, Homo sapiens
ttgtttgaggytaattagaaa

SEQ ID NO: 30454 - DNA, 21 bp, Homo sapiens
tctttaagttktctggaaaga

SEQ ID NO: 30455 - DNA, 21 bp, Homo sapiens
tgcatactcayattgtttctc

SEQ ID NO: 30456 - DNA, 21 bp, Homo sapiens
gctatctgggsctaatccctg

SEQ ID NO: 30457 - DNA, 21 bp, Homo sapiens
ggagggactarccaggctgct

SEQ ID NO: 30458 - DNA, 21 bp, Homo sapiens
tggttatggcrtcatctagaa

SEQ ID NO: 30459 - DNA, 21 bp, Homo sapiens
ctgagcagatragagtgggaa

SEQ ID NO: 30460 - DNA, 21 bp, Homo sapiens
tcttagacttkgcagtaaaaa

SEQ ID NO: 30461 - DNA, 21 bp, Homo sapiens
gtagtgagccraggaacctcc

SEQ ID NO: 30462 - DNA, 21 bp, Homo sapiens
accaacactamccccagtgct

SEQ ID NO: 30463 - DNA, 21 bp, Homo sapiens
ctcataacttmtaggaaaagg

SEQ ID NO: 30464 - DNA, 21 bp, Homo sapiens
atctctaaatytcagtgtcta

SEQ ID NO: 30465 - DNA, 21 bp, Homo sapiens
tccttgaatgygaagggtaag

SEQ ID NO: 30466 - DNA, 21 bp, Homo sapiens
ctgattaatamaacctctaga

SEQ ID NO: 30467 - DNA, 21 bp, Homo sapiens
gacaaagactyttaagtttct

SEQ ID NO: 30468 - DNA, 21 bp, Homo sapiens
agtggttgtcyggaggatgtt

SEQ ID NO: 30469 - DNA, 21 bp, Homo sapiens
tctaatgcaaygcctagatgc

SEQ ID NO: 30470 - DNA, 21 bp, Homo sapiens
tgtggccactrgatgctaaca

SEQ ID NO: 30471 - DNA, 21 bp, Homo sapiens
gatctctagaygacatgaaat

SEQ ID NO: 30472 - DNA, 21 bp, Homo sapiens
agcatgacatsattctcatca

SEQ ID NO: 30473 - DNA, 21 bp, Homo sapiens
aaaaaaaaatmtcagatcaat

SEQ ID NO: 30474 - DNA, 21 bp, Homo sapiens
taattaatatytgatattgaa

SEQ ID NO: 30475 - DNA, 21 bp, Homo sapiens
tttgaatctargaaaagaaca

SEQ ID NO: 30476 - DNA, 21 bp, Homo sapiens
ctagacagtcytatctgagta

SEQ ID NO: 30477 - DNA, 21 bp, Homo sapiens
acagtatgaakgatagatcac

SEQ ID NO: 30478 - DNA, 21 bp, Homo sapiens
gaataactgtratatgccaga

SEQ ID NO: 30479 - DNA, 21 bp, Homo sapiens
aaatgcacaakctcgggctgt

SEQ ID NO: 30480 - DNA, 21 bp, Homo sapiens
tgcaactagtkacttttgttt

SEQ ID NO: 30481 - DNA, 21 bp, Homo sapiens
caggataaatrtgagccaggt

SEQ ID NO: 30482 - DNA, 21 bp, Homo sapiens
agatgtggtcmtaccaaggag

SEQ ID NO: 30483 - DNA, 21 bp, Homo sapiens
cttttaatggygtattttaga

SEQ ID NO: 30484 - DNA, 21 bp, Homo sapiens
tgtgtctaccytgtttcttct

SEQ ID NO: 30485 - DNA, 21 bp, Homo sapiens
attgactgaawtaaccaaaca

SEQ ID NO: 30486 - DNA, 21 bp, Homo sapiens
agaggatcgcragcgctgtcc

SEQ ID NO: 30487 - DNA, 21 bp, Homo sapiens
cttattcacargtgagtcaca

SEQ ID NO: 30488 - DNA, 21 bp, Homo sapiens
aggagtggcaygcacaatcat

SEQ ID NO: 30489 - DNA, 21 bp, Homo sapiens
ccaggaaaagyaggagaaaga

SEQ ID NO: 30490 - DNA, 21 bp, Homo sapiens
atcacttgtaygctaatgatt

SEQ ID NO: 30491 - DNA, 21 bp, Homo sapiens
ttatgatgagyattgcacttg

SEQ ID NO: 30492 - DNA, 21 bp, Homo sapiens
aagaatagaartcatgacgaa

SEQ ID NO: 30493 - DNA, 21 bp, Homo sapiens
gaccaagaatratttgacatg

SEQ ID NO: 30494 - DNA, 21 bp, Homo sapiens
atttcatattrtattcactgg

SEQ ID NO: 30495 - DNA, 21 bp, Homo sapiens
aatttgacatytgcctccaga

SEQ ID NO: 30496 - DNA, 21 bp, Homo sapiens
aatttttcttkaacaatgcac

SEQ ID NO: 30497 - DNA, 21 bp, Homo sapiens
tttgcctggcrctccagtcat

SEQ ID NO: 30498 - DNA, 21 bp, Homo sapiens
aagatctatcygatggatgtt

SEQ ID NO: 30499 - DNA, 21 bp, Homo sapiens
caatacatcartacatattta

SEQ ID NO: 30500 - DNA, 21 bp, Homo sapiens
ttaaaaaaaayctactgttga

SEQ ID NO: 30501 - DNA, 21 bp, Homo sapiens
gacctatcaamaactaagatg

SEQ ID NO: 30502 - DNA, 21 bp, Homo sapiens
tttgtcaaagragaatattga

SEQ ID NO: 30503 - DNA, 21 bp, Homo sapiens
tggtttattarcagtattttt

SEQ ID NO: 30504 - DNA, 21 bp, Homo sapiens
catttaaatayaaaatttcct

SEQ ID NO: 30505 - DNA, 21 bp, Homo sapiens
gatatctaatktagttgcttt

SEQ ID NO: 30506 - DNA, 21 bp, Homo sapiens
aaagaaatgartgtcagttcc

SEQ ID NO: 30507 - DNA, 21 bp, Homo sapiens
gaaagttaatraaatatcgat

SEQ ID NO: 30508 - DNA, 21 bp, Homo sapiens
gaaataaattycaaatatacc

SEQ ID NO: 30509 - DNA, 21 bp, Homo sapiens
catataccagraagtttacga

SEQ ID NO: 30510 - DNA, 21 bp, Homo sapiens
ctcgattatgkgttttcatgg

SEQ ID NO: 30511 - DNA, 21 bp, Homo sapiens
tctcatgaggscttcactgag

SEQ ID NO: 30512 - DNA, 21 bp, Homo sapiens
attatctgtaraagtaacttg

SEQ ID NO: 30513 - DNA, 21 bp, Homo sapiens
ataattaaaaygttccattct

SEQ ID NO: 30514 - DNA, 21 bp, Homo sapiens
gccactgggcrtctgtttctc

SEQ ID NO: 30515 - DNA, 21 bp, Homo sapiens
ttctctgctgyttcccatggc

SEQ ID NO: 30516 - DNA, 21 bp, Homo sapiens
tagtagccaamacttattctg

SEQ ID NO: 30517 - DNA, 21 bp, Homo sapiens
gggccaaatcrtccttaagaa

SEQ ID NO: 30518 - DNA, 21 bp, Homo sapiens
agcattaaccrttcattcact

SEQ ID NO: 30519 - DNA, 21 bp, Homo sapiens
ttccattactytgatatcccc

SEQ ID NO: 30520 - DNA, 21 bp, Homo sapiens
ttatgcaaacmaaatgcaaac

SEQ ID NO: 30521 - DNA, 21 bp, Homo sapiens
taaagttctcratcacagata

SEQ ID NO: 30522 - DNA, 21 bp, Homo sapiens
acgtctgtcakataatgactg

SEQ ID NO: 30523 - DNA, 21 bp, Homo sapiens
tatgaaagtcrtagggccagt

SEQ ID NO: 30524 - DNA, 21 bp, Homo sapiens
attgtcagtcytccatcacca

SEQ ID NO: 30525 - DNA, 21 bp, Homo sapiens
ggaaatggttygtattctagc

SEQ ID NO: 30526 - DNA, 21 bp, Homo sapiens
atttaaaataktcacggtaat

SEQ ID NO: 30527 - DNA, 21 bp, Homo sapiens
aagcttagaakactttttaaa

SEQ ID NO: 30528 - DNA, 21 bp, Homo sapiens
aaaagatgcayggctagaaaa

SEQ ID NO: 30529 - DNA, 21 bp, Homo sapiens
tgcgctactgmaaagccctac

SEQ ID NO: 30530 - DNA, 21 bp, Homo sapiens
gagcaactatrtccactccct

SEQ ID NO: 30531 - DNA, 21 bp, Homo sapiens
aacactccacktaagtttgta

SEQ ID NO: 30532 - DNA, 21 bp, Homo sapiens
agaatcctcayatctcactgc

SEQ ID NO: 30533 - DNA, 21 bp, Homo sapiens
aaatgagtctwaatcaagttt

SEQ ID NO: 30534 - DNA, 21 bp, Homo sapiens
tgtgacagacyctgcgattta

SEQ ID NO: 30535 - DNA, 21 bp, Homo sapiens
aggcatagaartttgagggcc

SEQ ID NO: 30536 - DNA, 21 bp, Homo sapiens
attcttggagwcacaggcttt

SEQ ID NO: 30537 - DNA, 21 bp, Homo sapiens
ttgatttatayactattctgg

SEQ ID NO: 30538 - DNA, 21 bp, Homo sapiens
gtgatgaggcygaacgtgtat

SEQ ID NO: 30539 - DNA, 21 bp, Homo sapiens
taacaattgayctgtaagttt

SEQ ID NO: 30540 - DNA, 21 bp, Homo sapiens
acacgttcaarttacctaatt

SEQ ID NO: 30541 - DNA, 21 bp, Homo sapiens
tgtgtttccaygactactttt

SEQ ID NO: 30542 - DNA, 21 bp, Homo sapiens
tctttattttygccatggtca

SEQ ID NO: 30543 - DNA, 21 bp, Homo sapiens
ggccctgataktagtagaaat

SEQ ID NO: 30544 - DNA, 21 bp, Homo sapiens
aaataaccacytcaaccttta

SEQ ID NO: 30545 - DNA, 21 bp, Homo sapiens
agatgcacagytgttgatcat

SEQ ID NO: 30546 - DNA, 21 bp, Homo sapiens
ttttctcagtscaagaggggg

SEQ ID NO: 30547 - DNA, 21 bp, Homo sapiens
gatttgagacraagatactgt

SEQ ID NO: 30548 - DNA, 21 bp, Homo sapiens
tctactctttrcagtatggat

SEQ ID NO: 30549 - DNA, 21 bp, Homo sapiens
catggaaagayggtgtggtgc

SEQ ID NO: 30550 - DNA, 21 bp, Homo sapiens
gcagctggacrtgggttgcca

SEQ ID NO: 30551 - DNA, 21 bp, Homo sapiens
gatgtatagartgagtaggca

SEQ ID NO: 30552 - DNA, 21 bp, Homo sapiens
gttgtaggatyttacatcatt

SEQ ID NO: 30553 - DNA, 21 bp, Homo sapiens
cttccatatgygtttaaactt

SEQ ID NO: 30554 - DNA, 21 bp, Homo sapiens
cagcctaggakaaattaactc

SEQ ID NO: 30555 - DNA, 21 bp, Homo sapiens
tctcggcccaygatgatccac

SEQ ID NO: 30556 - DNA, 21 bp, Homo sapiens
ccgaagctcaktggccgccag

SEQ ID NO: 30557 - DNA, 21 bp, Homo sapiens
agcagaacctrtgtccatcag

SEQ ID NO: 30558 - DNA, 21 bp, Homo sapiens
atgctcttttrgatctctgtg

SEQ ID NO: 30559 - DNA, 21 bp, Homo sapiens
tggtagtagcratattattac

SEQ ID NO: 30560 - DNA, 21 bp, Homo sapiens
tccatactacytgagcattta

SEQ ID NO: 30561 - DNA, 21 bp, Homo sapiens
atacatggaaraaaattcagt

SEQ ID NO: 30562 - DNA, 21 bp, Homo sapiens
aatgtgtggtkttgagatgca

SEQ ID NO: 30563 - DNA, 21 bp, Homo sapiens
tatgagtcaartgttatactg

SEQ ID NO: 30564 - DNA, 21 bp, Homo sapiens
aatagaattargctaacccaa

SEQ ID NO: 30565 - DNA, 21 bp, Homo sapiens
gtgtcaaagaygggagagaga

SEQ ID NO: 30566 - DNA, 21 bp, Homo sapiens
ccatggcagtracttggacac

SEQ ID NO: 30567 - DNA, 21 bp, Homo sapiens
agaatggcttygacgtagaca

SEQ ID NO: 30568 - DNA, 21 bp, Homo sapiens
atgccctaaayttcctttcaa

SEQ ID NO: 30569 - DNA, 21 bp, Homo sapiens
aaatgctcctrgcctaacaaa

SEQ ID NO: 30570 - DNA, 21 bp, Homo sapiens
atcaaaagtayccaagttttg

SEQ ID NO: 30571 - DNA, 21 bp, Homo sapiens
gactaactttygtattgctgg

SEQ ID NO: 30572 - DNA, 21 bp, Homo sapiens
tgacttagacktatatctagc

SEQ ID NO: 30573 - DNA, 21 bp, Homo sapiens
tcagggaactytttctcatat

SEQ ID NO: 30574 - DNA, 21 bp, Homo sapiens
actggaaatamgcttgtaaca

SEQ ID NO: 30575 - DNA, 21 bp, Homo sapiens
ctcagtgtctygatagatggg

SEQ ID NO: 30576 - DNA, 21 bp, Homo sapiens
ctgaataagartttccagaat

SEQ ID NO: 30577 - DNA, 21 bp, Homo sapiens
acattgtttcratgacactga

SEQ ID NO: 30578 - DNA, 21 bp, Homo sapiens
agtgcctcttyggtaacaaat

SEQ ID NO: 30579 - DNA, 21 bp, Homo sapiens
ctcttctctgragaaacgctg

SEQ ID NO: 30580 - DNA, 21 bp, Homo sapiens
agttgttggcrggtcctggtt

SEQ ID NO: 30581 - DNA, 21 bp, Homo sapiens
gtattcttagmagtagagagc

SEQ ID NO: 30582 - DNA, 21 bp, Homo sapiens
tccctctgtcmgcttgccaag

SEQ ID NO: 30583 - DNA, 21 bp, Homo sapiens
atactaacttkaacaaccaag

SEQ ID NO: 30584 - DNA, 21 bp, Homo sapiens
aatatgcttgktcttgaaatc

SEQ ID NO: 30585 - DNA, 21 bp, Homo sapiens
agcttgaaagktcttcccctg

SEQ ID NO: 30586 - DNA, 21 bp, Homo sapiens
tatcaagattytaaagtggtt

SEQ ID NO: 30587 - DNA, 21 bp, Homo sapiens
tggacagaatyattatgaagt

SEQ ID NO: 30588 - DNA, 21 bp, Homo sapiens
ccaggcgatayagggttttgt

SEQ ID NO: 30589 - DNA, 21 bp, Homo sapiens
aaaatagttcyggcgtcaaac

SEQ ID NO: 30590 - DNA, 21 bp, Homo sapiens
aagatgcatgrcctgaactcg

SEQ ID NO: 30591 - DNA, 21 bp, Homo sapiens
ggatcttcagyggcgcgctta

SEQ ID NO: 30592 - DNA, 21 bp, Homo sapiens
ctgcaattcaratgtggagag

SEQ ID NO: 30593 - DNA, 21 bp, Homo sapiens
gtaacacttayttgcattagt

SEQ ID NO: 30594 - DNA, 21 bp, Homo sapiens
ctgcaaatctktgttggaatg

SEQ ID NO: 30595 - DNA, 21 bp, Homo sapiens
aggtaaggtartactaatata

SEQ ID NO: 30596 - DNA, 21 bp, Homo sapiens
tggaagctacrcaggaccaag

SEQ ID NO: 30597 - DNA, 21 bp, Homo sapiens
gcaccttaaartatttgtggt

SEQ ID NO: 30598 - DNA, 21 bp, Homo sapiens
taaaccaattrcggagctgta

SEQ ID NO: 30599 - DNA, 21 bp, Homo sapiens
gtcttggatayggcgacgcca

SEQ ID NO: 30600 - DNA, 21 bp, Homo sapiens
aggctggtggsttaaatgaaa

SEQ ID NO: 30601 - DNA, 21 bp, Homo sapiens
ccagtcttacrtagaatattt

SEQ ID NO: 30602 - DNA, 21 bp, Homo sapiens
tgatacttaasaagtgtttct

SEQ ID NO: 30603 - DNA, 21 bp, Homo sapiens
ctattacatarcctattcagt

SEQ ID NO: 30604 - DNA, 21 bp, Homo sapiens
acctttgtgtrtctttatgtc

SEQ ID NO: 30605 - DNA, 21 bp, Homo sapiens
agcatgtttartactgctcag

SEQ ID NO: 30606 - DNA, 21 bp, Homo sapiens
gaactttcccktatataaaat

SEQ ID NO: 30607 - DNA, 21 bp, Homo sapiens
tgctatgattyctgcatacaa

SEQ ID NO: 30608 - DNA, 21 bp, Homo sapiens
tcactgacaartaacaacttt

SEQ ID NO: 30609 - DNA, 21 bp, Homo sapiens
ttaatattgcyggcttttacc

SEQ ID NO: 30610 - DNA, 21 bp, Homo sapiens
gggtatgacaygtcttcaaag

SEQ ID NO: 30611 - DNA, 21 bp, Homo sapiens
aaatagcaatktgttactttc

SEQ ID NO: 30612 - DNA, 21 bp, Homo sapiens
tgaaaatgaayaaatgagtgt

SEQ ID NO: 30613 - DNA, 21 bp, Homo sapiens
gtgcaatatayagtaaaagag

SEQ ID NO: 30614 - DNA, 21 bp, Homo sapiens
catctgtgaaytgcatgctta

SEQ ID NO: 30615 - DNA, 21 bp, Homo sapiens
tagactctggytatcttgttg

SEQ ID NO: 30616 - DNA, 21 bp, Homo sapiens
gatactcctgrgaatgctgaa

SEQ ID NO: 30617 - DNA, 21 bp, Homo sapiens
gtttgagtttrggccagttta

SEQ ID NO: 30618 - DNA, 21 bp, Homo sapiens
ctcactcccarttgatgatgg

SEQ ID NO: 30619 - DNA, 21 bp, Homo sapiens
acgtccagacrgggttacgac

SEQ ID NO: 30620 - DNA, 21 bp, Homo sapiens
tccaaaactarcaagatgggg

SEQ ID NO: 30621 - DNA, 21 bp, Homo sapiens
gcaatagtgtracgtctggtt

SEQ ID NO: 30622 - DNA, 21 bp, Homo sapiens
gcatctatttrcccctgtatc

SEQ ID NO: 30623 - DNA, 21 bp, Homo sapiens
tcctcttctcrtctgtttgta

SEQ ID NO: 30624 - DNA, 21 bp, Homo sapiens
tctgatgtctrtgtagttggg

SEQ ID NO: 30625 - DNA, 21 bp, Homo sapiens
tgtttagcagygtttttacct

SEQ ID NO: 30626 - DNA, 21 bp, Homo sapiens
tttgactagcmgttcagaaga

SEQ ID NO: 30627 - DNA, 21 bp, Homo sapiens
ttatttcctawttggaggaat

SEQ ID NO: 30628 - DNA, 21 bp, Homo sapiens
tatgaatagtragaatctgaa

SEQ ID NO: 30629 - DNA, 21 bp, Homo sapiens
tctaaaggtargaatagcagt

SEQ ID NO: 30630 - DNA, 21 bp, Homo sapiens
acacagagttygcttaatatc

SEQ ID NO: 30631 - DNA, 21 bp, Homo sapiens
aaagaggtacstgacagcttc

SEQ ID NO: 30632 - DNA, 21 bp, Homo sapiens
aacttctcacrtaaacatact

SEQ ID NO: 30633 - DNA, 21 bp, Homo sapiens
tgttgtaaaartcatgaaatt

SEQ ID NO: 30634 - DNA, 21 bp, Homo sapiens
aaacttacatyaggaaaggtg

SEQ ID NO: 30635 - DNA, 21 bp, Homo sapiens
agcagcaatgyacaatatgtg

SEQ ID NO: 30636 - DNA, 21 bp, Homo sapiens
ccaactcagaratggagtgac

SEQ ID NO: 30637 - DNA, 21 bp, Homo sapiens
ttgctcacctygtgcagtctc

SEQ ID NO: 30638 - DNA, 21 bp, Homo sapiens
cccctgccctrccagccggca

SEQ ID NO: 30639 - DNA, 21 bp, Homo sapiens
gcccagacccrcagcagtccc

SEQ ID NO: 30640 - DNA, 21 bp, Homo sapiens
agcagaacccmtcagctcttt

SEQ ID NO: 30641 - DNA, 21 bp, Homo sapiens
atgtcaacccytaagaaatat

SEQ ID NO: 30642 - DNA, 21 bp, Homo sapiens
gctggacactrtttccatctg

SEQ ID NO: 30643 - DNA, 21 bp, Homo sapiens
agtgttttcasgcacgctggc

SEQ ID NO: 30644 - DNA, 21 bp, Homo sapiens
aaaataaggtwtattctgctg

SEQ ID NO: 30645 - DNA, 21 bp, Homo sapiens
tagtttcaatytaaaatggga

SEQ ID NO: 30646 - DNA, 21 bp, Homo sapiens
agagttctagrtgcattatct

SEQ ID NO: 30647 - DNA, 21 bp, Homo sapiens
agaatgattgrccattcctaa

SEQ ID NO: 30648 - DNA, 21 bp, Homo sapiens
acgatctgcayggagatgtag

SEQ ID NO: 30649 - DNA, 21 bp, Homo sapiens
ctcttcacagragaacagaac

SEQ ID NO: 30650 - DNA, 21 bp, Homo sapiens
ttgagcctaawgtaatggcaa

SEQ ID NO: 30651 - DNA, 21 bp, Homo sapiens
tcttgcataawcgtgaagaat

SEQ ID NO: 30652 - DNA, 21 bp, Homo sapiens
gtgactccttscctgttataa

SEQ ID NO: 30653 - DNA, 21 bp, Homo sapiens
tttcttctccygccaaacgtt

SEQ ID NO: 30654 - DNA, 21 bp, Homo sapiens
gttccctggayaccgggcact

SEQ ID NO: 30655 - DNA, 21 bp, Homo sapiens
gctgctctgcmacagtgagga

SEQ ID NO: 30656 - DNA, 21 bp, Homo sapiens
ttaggaccgaygggtgcacat

SEQ ID NO: 30657 - DNA, 21 bp, Homo sapiens
cagttgtcagycatctttcag

SEQ ID NO: 30658 - DNA, 21 bp, Homo sapiens
gggttggttgktgatgatcac

SEQ ID NO: 30659 - DNA, 21 bp, Homo sapiens
tatttatcaarccaaagtgtt

SEQ ID NO: 30660 - DNA, 21 bp, Homo sapiens
gctttatgcgyccatcatcag

SEQ ID NO: 30661 - DNA, 21 bp, Homo sapiens
ggcaaggaatmaaactatttt

SEQ ID NO: 30662 - DNA, 21 bp, Homo sapiens
ccatattaacrtaatgattga

SEQ ID NO: 30663 - DNA, 21 bp, Homo sapiens
atttctgcaaygtaactgttg

SEQ ID NO: 30664 - DNA, 21 bp, Homo sapiens
atgaataagasggactctcct

SEQ ID NO: 30665 - DNA, 21 bp, Homo sapiens
ggaccccagcrgtacaagcag

SEQ ID NO: 30666 - DNA, 21 bp, Homo sapiens
gtgcttgactrtttctatgtg

SEQ ID NO: 30667 - DNA, 21 bp, Homo sapiens
gccacgctccwtcatgggtgg

SEQ ID NO: 30668 - DNA, 21 bp, Homo sapiens
tagtattagtrgatttatttg

SEQ ID NO: 30669 - DNA, 21 bp, Homo sapiens
catctccagtygtcttggggg

SEQ ID NO: 30670 - DNA, 21 bp, Homo sapiens
caatgtggccrggtttagagc

SEQ ID NO: 30671 - DNA, 21 bp, Homo sapiens
gggcctggggygaggctggat

SEQ ID NO: 30672 - DNA, 21 bp, Homo sapiens
gcacacacacrcacctggaac

SEQ ID NO: 30673 - DNA, 21 bp, Homo sapiens
tgtcagtgttrccaatgaagg

SEQ ID NO: 30674 - DNA, 21 bp, Homo sapiens
tagaggcatgsaggatcgctt

SEQ ID NO: 30675 - DNA, 21 bp, Homo sapiens
aatgaatattrgcacttttgg

SEQ ID NO: 30676 - DNA, 21 bp, Homo sapiens
aggatacttayttgagtctga

SEQ ID NO: 30677 - DNA, 21 bp, Homo sapiens
tcaactttggytgttcttcaa

SEQ ID NO: 30678 - DNA, 21 bp, Homo sapiens
gtgctggtatscaaaccgggg

SEQ ID NO: 30679 - DNA, 21 bp, Homo sapiens
aaagcaaaatytcaccagtgt

SEQ ID NO: 30680 - DNA, 21 bp, Homo sapiens
ctctacacagstgtcagactc

SEQ ID NO: 30681 - DNA, 21 bp, Homo sapiens
agaacttggartaaaatttca

SEQ ID NO: 30682 - DNA, 21 bp, Homo sapiens
acaacatttcragaacaattc

SEQ ID NO: 30683 - DNA, 21 bp, Homo sapiens
aaattgatctktgtgtattca

SEQ ID NO: 30684 - DNA, 21 bp, Homo sapiens
cctaagttttrggagtatcat

SEQ ID NO: 30685 - DNA, 21 bp, Homo sapiens
agtctttgaarttgtcagtga

SEQ ID NO: 30686 - DNA, 21 bp, Homo sapiens
tgatggacacrctggaaaatt

SEQ ID NO: 30687 - DNA, 21 bp, Homo sapiens
ctattttggarggacctatct

SEQ ID NO: 30688 - DNA, 21 bp, Homo sapiens
gcttcctgtgwcactaggttg

SEQ ID NO: 30689 - DNA, 21 bp, Homo sapiens
aaaaatagcckgtttccaccc

SEQ ID NO: 30690 - DNA, 21 bp, Homo sapiens
gagctgtcgtracatagaata

SEQ ID NO: 30691 - DNA, 21 bp, Homo sapiens
tgtgcatctcyttctgtctct

SEQ ID NO: 30692 - DNA, 21 bp, Homo sapiens
ggtgctgtgtygttggactcc

SEQ ID NO: 30693 - DNA, 21 bp, Homo sapiens
gatgttcaagytcaaggggct

SEQ ID NO: 30694 - DNA, 21 bp, Homo sapiens
attaattagcmgaatccctgt

SEQ ID NO: 30695 - DNA, 21 bp, Homo sapiens
taacagaccaktttttcaggg

SEQ ID NO: 30696 - DNA, 21 bp, Homo sapiens
gtagtaaagaytcttgcggtc

SEQ ID NO: 30697 - DNA, 21 bp, Homo sapiens
gctttcaagayttataatcca

SEQ ID NO: 30698 - DNA, 21 bp, Homo sapiens
ggaaatgtccraagtttagga

SEQ ID NO: 30699 - DNA, 21 bp, Homo sapiens
ttattacttaraaactttcca

SEQ ID NO: 30700 - DNA, 21 bp, Homo sapiens
attaattgccmagtacttaca

SEQ ID NO: 30701 - DNA, 21 bp, Homo sapiens
atcacgaactyctcatcaatc

SEQ ID NO: 30702 - DNA, 21 bp, Homo sapiens
taggatggcaraggccacata

SEQ ID NO: 30703 - DNA, 21 bp, Homo sapiens
ctacttaataraatggtttct

SEQ ID NO: 30704 - DNA, 21 bp, Homo sapiens
gcttccctacktttgtggctt

SEQ ID NO: 30705 - DNA, 21 bp, Homo sapiens
ggatgttaggyatcctccaat

SEQ ID NO: 30706 - DNA, 21 bp, Homo sapiens
agcaccagtgmccacctgagg

SEQ ID NO: 30707 - DNA, 21 bp, Homo sapiens
aaataaatacktgttggcaat

SEQ ID NO: 30708 - DNA, 21 bp, Homo sapiens
gagtctttacratatattaat

SEQ ID NO: 30709 - DNA, 21 bp, Homo sapiens
aattgtaaatktgagattaag

SEQ ID NO: 30710 - DNA, 21 bp, Homo sapiens
atctgtatttyctatgtgact

SEQ ID NO: 30711 - DNA, 21 bp, Homo sapiens
aaatttcaatrtctgtacctg

SEQ ID NO: 30712 - DNA, 21 bp, Homo sapiens
tagagacctasaaagaaactt

SEQ ID NO: 30713 - DNA, 21 bp, Homo sapiens
acaaagatgawgttggatagt

SEQ ID NO: 30714 - DNA, 21 bp, Homo sapiens
aaatttcaatytttatctcta

SEQ ID NO: 30715 - DNA, 21 bp, Homo sapiens
tatagcatcastgtattcagg

SEQ ID NO: 30716 - DNA, 21 bp, Homo sapiens
tataaattgaytgacatttgt

SEQ ID NO: 30717 - DNA, 21 bp, Homo sapiens
gtagattatcrtgttacagtg

SEQ ID NO: 30718 - DNA, 21 bp, Homo sapiens
aatcaataatytcagtaagca

SEQ ID NO: 30719 - DNA, 21 bp, Homo sapiens
gacctggttcyaaacagacta

SEQ ID NO: 30720 - DNA, 21 bp, Homo sapiens
agccatttgcytttagactta

SEQ ID NO: 30721 - DNA, 21 bp, Homo sapiens
ccatttgtagrtgtgcatatt

SEQ ID NO: 30722 - DNA, 21 bp, Homo sapiens
tttacccactrgactttgtaa

SEQ ID NO: 30723 - DNA, 21 bp, Homo sapiens
aaagcagtcasaacattcata

SEQ ID NO: 30724 - DNA, 21 bp, Homo sapiens
ttaaccagaaratgtgaacca

SEQ ID NO: 30725 - DNA, 21 bp, Homo sapiens
aacctcagctyttatgtcact

SEQ ID NO: 30726 - DNA, 21 bp, Homo sapiens
ctctatagccrtcacggttgg

SEQ ID NO: 30727 - DNA, 21 bp, Homo sapiens
aattaaaaccyacaaaaaaca

SEQ ID NO: 30728 - DNA, 21 bp, Homo sapiens
gacagtgctgrcctcccttca

SEQ ID NO: 30729 - DNA, 21 bp, Homo sapiens
ggtgcccagcrcacacttagt

SEQ ID NO: 30730 - DNA, 21 bp, Homo sapiens
tacacagcaamcacagggttt

SEQ ID NO: 30731 - DNA, 21 bp, Homo sapiens
tcaaaggagtrtaagacagag

SEQ ID NO: 30732 - DNA, 21 bp, Homo sapiens
gctgaccccargcaagtcatc

SEQ ID NO: 30733 - DNA, 21 bp, Homo sapiens
tttgtatcacrctgcgggatg

SEQ ID NO: 30734 - DNA, 21 bp, Homo sapiens
taaaacaaagycacagcacag

SEQ ID NO: 30735 - DNA, 21 bp, Homo sapiens
ttatagttccrtaggtccctg

SEQ ID NO: 30736 - DNA, 21 bp, Homo sapiens
tgggaaccatyactatcgcca

SEQ ID NO: 30737 - DNA, 21 bp, Homo sapiens
atacttacttygttgaaatcg

SEQ ID NO: 30738 - DNA, 21 bp, Homo sapiens
tgtccagtacygaatgttccc

SEQ ID NO: 30739 - DNA, 21 bp, Homo sapiens
atggtgccacrggcatggccg

SEQ ID NO: 30740 - DNA, 21 bp, Homo sapiens
gtggtttatckgacacccagg

SEQ ID NO: 30741 - DNA, 21 bp, Homo sapiens
tttgctgcagraggctgaaaa

SEQ ID NO: 30742 - DNA, 21 bp, Homo sapiens
tgcacaggaaycccacgctta

SEQ ID NO: 30743 - DNA, 21 bp, Homo sapiens
cttctcagacrgtgcaaccca

SEQ ID NO: 30744 - DNA, 21 bp, Homo sapiens
caaggaaaccraggttcagag

SEQ ID NO: 30745 - DNA, 21 bp, Homo sapiens
aggagagaccrgcgtgcatgg

SEQ ID NO: 30746 - DNA, 21 bp, Homo sapiens
tggagcggagktggacactgc

SEQ ID NO: 30747 - DNA, 21 bp, Homo sapiens
aatgggcatgrcaatagtaag

SEQ ID NO: 30748 - DNA, 21 bp, Homo sapiens
gaatcctcttsttcctccacc

SEQ ID NO: 30749 - DNA, 21 bp, Homo sapiens
cttggactccygtgagccaga

SEQ ID NO: 30750 - DNA, 21 bp, Homo sapiens
atcagagcccrggaagctcct

SEQ ID NO: 30751 - DNA, 21 bp, Homo sapiens
atctggaaaayggggctcatc

SEQ ID NO: 30752 - DNA, 21 bp, Homo sapiens
cagagttaatktggaagtgaa

SEQ ID NO: 30753 - DNA, 21 bp, Homo sapiens
aacttgggaaycagggcacct

SEQ ID NO: 30754 - DNA, 21 bp, Homo sapiens
caggacctgayggtacaaata

SEQ ID NO: 30755 - DNA, 21 bp, Homo sapiens
gttttccaagmaggatgctac

SEQ ID NO: 30756 - DNA, 21 bp, Homo sapiens
agaaccatatyccaacagcac

SEQ ID NO: 30757 - DNA, 21 bp, Homo sapiens
attgcatcagwgaaaacatta

SEQ ID NO: 30758 - DNA, 21 bp, Homo sapiens
cctccaaagasctcccatggt

SEQ ID NO: 30759 - DNA, 21 bp, Homo sapiens
gcccaagtgtygcttcttcag

SEQ ID NO: 30760 - DNA, 21 bp, Homo sapiens
ttttctaagtyttgtattagt

SEQ ID NO: 30761 - DNA, 21 bp, Homo sapiens
gagcaacacakgaaaagttga

SEQ ID NO: 30762 - DNA, 21 bp, Homo sapiens
ggaaaacgackccccaaacag

SEQ ID NO: 30763 - DNA, 21 bp, Homo sapiens
tactggtcctyatgactgtgc

SEQ ID NO: 30764 - DNA, 21 bp, Homo sapiens
ttgtgccttayttataattta

SEQ ID NO: 30765 - DNA, 21 bp, Homo sapiens
cccatagacawtagaacctat

SEQ ID NO: 30766 - DNA, 21 bp, Homo sapiens
atactggagcrcaactgtatg

SEQ ID NO: 30767 - DNA, 21 bp, Homo sapiens
aacatgacgtkttccaaattt

SEQ ID NO: 30768 - DNA, 21 bp, Homo sapiens
aatcaatcatrttcctgagtt

SEQ ID NO: 30769 - DNA, 21 bp, Homo sapiens
tgtttcttgtrttggaattta

SEQ ID NO: 30770 - DNA, 21 bp, Homo sapiens
ctgcactagawcacaacttca

SEQ ID NO: 30771 - DNA, 21 bp, Homo sapiens
cttagctgtgrtgccaggggg

SEQ ID NO: 30772 - DNA, 21 bp, Homo sapiens
ttcatttctcrcagactgaac

SEQ ID NO: 30773 - DNA, 21 bp, Homo sapiens
tgctgaaatgytatttaaaag

SEQ ID NO: 30774 - DNA, 21 bp, Homo sapiens
tctttatgcaytttacatggc

SEQ ID NO: 30775 - DNA, 21 bp, Homo sapiens
ctaagccccayagatgtaagc

SEQ ID NO: 30776 - DNA, 21 bp, Homo sapiens
gtctgtactcrgcaggacagt

SEQ ID NO: 30777 - DNA, 21 bp, Homo sapiens
acacctctacyggaagaaaac

SEQ ID NO: 30778 - DNA, 21 bp, Homo sapiens
tgagatgagcytttcacctcc

SEQ ID NO: 30779 - DNA, 21 bp, Homo sapiens
agaaaagtaaratttctatgc

SEQ ID NO: 30780 - DNA, 21 bp, Homo sapiens
aaatgaaatcrgtacaggttg

SEQ ID NO: 30781 - DNA, 21 bp, Homo sapiens
tgtgtctctgmattgatgtct

SEQ ID NO: 30782 - DNA, 21 bp, Homo sapiens
tacatctcaaratcatgccat

SEQ ID NO: 30783 - DNA, 21 bp, Homo sapiens
acagtgctttktcagtgctgg

SEQ ID NO: 30784 - DNA, 21 bp, Homo sapiens
gatgcctcaayactcctggtc

SEQ ID NO: 30785 - DNA, 21 bp, Homo sapiens
tgtaaaatagytattgtgagc

SEQ ID NO: 30786 - DNA, 21 bp, Homo sapiens
aaagtagtgartgagcatatt

SEQ ID NO: 30787 - DNA, 21 bp, Homo sapiens
ttccatcacayttatttaaat

SEQ ID NO: 30788 - DNA, 21 bp, Homo sapiens
taggaggactrggttctttca

SEQ ID NO: 30789 - DNA, 21 bp, Homo sapiens
ttaaataaccrtcagagaagg

SEQ ID NO: 30790 - DNA, 21 bp, Homo sapiens
gcttttgagtrttctccaatt

SEQ ID NO: 30791 - DNA, 21 bp, Homo sapiens
cctaaaggccraccttggcat

SEQ ID NO: 30792 - DNA, 21 bp, Homo sapiens
tccaaacagartcacaccatt

SEQ ID NO: 30793 - DNA, 21 bp, Homo sapiens
cactggggtawtcactcttaa

SEQ ID NO: 30794 - DNA, 21 bp, Homo sapiens
aaacttctacrtttgggcaat

SEQ ID NO: 30795 - DNA, 21 bp, Homo sapiens
acctgtagaarttgcctggtg

SEQ ID NO: 30796 - DNA, 21 bp, Homo sapiens
actttttcatmatttttgtct

SEQ ID NO: 30797 - DNA, 21 bp, Homo sapiens
tatgaataaaygtggtgaaat

SEQ ID NO: 30798 - DNA, 21 bp, Homo sapiens
tacaaataaaygtgtgaaata

SEQ ID NO: 30799 - DNA, 21 bp, Homo sapiens
tacgtggaccrggctgtgcgg

SEQ ID NO: 30800 - DNA, 21 bp, Homo sapiens
caatgaaagayatgatagtaa

SEQ ID NO: 30801 - DNA, 21 bp, Homo sapiens
tctactgtcaytatcattcta

SEQ ID NO: 30802 - DNA, 21 bp, Homo sapiens
ccagataaggwgtcactggat

SEQ ID NO: 30803 - DNA, 21 bp, Homo sapiens
acagtttctakttcctcctga

SEQ ID NO: 30804 - DNA, 21 bp, Homo sapiens
agtacatttayctctatttat

SEQ ID NO: 30805 - DNA, 21 bp, Homo sapiens
atggcagtacsttgctcaaga

SEQ ID NO: 30806 - DNA, 21 bp, Homo sapiens
ccaactagagmtttcctatag

SEQ ID NO: 30807 - DNA, 21 bp, Homo sapiens
tcagttctagwtttgtcaggt

SEQ ID NO: 30808 - DNA, 21 bp, Homo sapiens
caattctgctstaatgtatgt

SEQ ID NO: 30809 - DNA, 21 bp, Homo sapiens
tattttctacmtgcctaggct

SEQ ID NO: 30810 - DNA, 21 bp, Homo sapiens
tgatagtcagwtttaccattt

SEQ ID NO: 30811 - DNA, 21 bp, Homo sapiens
aaaaatgaaaytataacaagt

SEQ ID NO: 30812 - DNA, 21 bp, Homo sapiens
catatggcagrggtatatgta

SEQ ID NO: 30813 - DNA, 21 bp, Homo sapiens
caatgtcataratctacagtg

SEQ ID NO: 30814 - DNA, 21 bp, Homo sapiens
gaaagacatakatccaggaac

SEQ ID NO: 30815 - DNA, 21 bp, Homo sapiens
taatttgtatmctgctgtgat

SEQ ID NO: 30816 - DNA, 21 bp, Homo sapiens
tgtgtgtctasaattattcct

SEQ ID NO: 30817 - DNA, 21 bp, Homo sapiens
ctgaagaacarattactcaat

SEQ ID NO: 30818 - DNA, 21 bp, Homo sapiens
tgtttctgaawcctattagag

SEQ ID NO: 30819 - DNA, 21 bp, Homo sapiens
taaccattaartgtgtattag

SEQ ID NO: 30820 - DNA, 21 bp, Homo sapiens
atgagtatgarttgacttagg

SEQ ID NO: 30821 - DNA, 21 bp, Homo sapiens
tgatattttartgtataaacc

SEQ ID NO: 30822 - DNA, 21 bp, Homo sapiens
ttggtagaccycaagttaatg

SEQ ID NO: 30823 - DNA, 21 bp, Homo sapiens
acacttaaccrtagtaatgat

SEQ ID NO: 30824 - DNA, 21 bp, Homo sapiens
agagaatacayagagaaaatt

SEQ ID NO: 30825 - DNA, 21 bp, Homo sapiens
gagaggggatratatttccca

SEQ ID NO: 30826 - DNA, 21 bp, Homo sapiens
taattcaaacytcaccaacaa

SEQ ID NO: 30827 - DNA, 21 bp, Homo sapiens
gtcacttaaaytgaagcatcc

SEQ ID NO: 30828 - DNA, 21 bp, Homo sapiens
aagcctgcatratgggctcac

SEQ ID NO: 30829 - DNA, 21 bp, Homo sapiens
aataatctagrctctatgagc

SEQ ID NO: 30830 - DNA, 21 bp, Homo sapiens
gcctacatttytatataaaac

SEQ ID NO: 30831 - DNA, 21 bp, Homo sapiens
gaagtgatctraacaatacta

SEQ ID NO: 30832 - DNA, 21 bp, Homo sapiens
ttgggagtcaragatagttaa

SEQ ID NO: 30833 - DNA, 21 bp, Homo sapiens
ttggaactatrtcaggaatgc

SEQ ID NO: 30834 - DNA, 21 bp, Homo sapiens
atatgaagtasatcactcaga

SEQ ID NO: 30835 - DNA, 21 bp, Homo sapiens
aatgtataaargagatagtac

SEQ ID NO: 30836 - DNA, 21 bp, Homo sapiens
aaccccagctkggatactgtc

SEQ ID NO: 30837 - DNA, 21 bp, Homo sapiens
atagaagccarcataaaccac

SEQ ID NO: 30838 - DNA, 21 bp, Homo sapiens
tggacatatcygcccccaagg

SEQ ID NO: 30839 - DNA, 21 bp, Homo sapiens
ctatatttaamcctcggtgaa

SEQ ID NO: 30840 - DNA, 21 bp, Homo sapiens
accatcttctkttggaagtca

SEQ ID NO: 30841 - DNA, 21 bp, Homo sapiens
ctccaggaaaytcctaactac

SEQ ID NO: 30842 - DNA, 21 bp, Homo sapiens
tgctggcagaytgattgtctc

SEQ ID NO: 30843 - DNA, 21 bp, Homo sapiens
ttacttttttygtgatcgtac

SEQ ID NO: 30844 - DNA, 21 bp, Homo sapiens
aaatatagcayctgaagaagt

SEQ ID NO: 30845 - DNA, 21 bp, Homo sapiens
cattgtcctcyttatagtctt

SEQ ID NO: 30846 - DNA, 21 bp, Homo sapiens
gaacccttacstgagaggctg

SEQ ID NO: 30847 - DNA, 21 bp, Homo sapiens
tagtacatagwtgtagatgac

SEQ ID NO: 30848 - DNA, 21 bp, Homo sapiens
gatttagcagygtaatttagt

SEQ ID NO: 30849 - DNA, 21 bp, Homo sapiens
taggaatttgytgcctcattg

SEQ ID NO: 30850 - DNA, 21 bp, Homo sapiens
atgaagagaaygcacatttga

SEQ ID NO: 30851 - DNA, 21 bp, Homo sapiens
actcaagaaaktttgtctccc

SEQ ID NO: 30852 - DNA, 21 bp, Homo sapiens
gtttgaattaygggtatttct

SEQ ID NO: 30853 - DNA, 21 bp, Homo sapiens
tttgtccactrcaaaaaaaca

SEQ ID NO: 30854 - DNA, 21 bp, Homo sapiens
tttcctcttcstgttatggtc

SEQ ID NO: 30855 - DNA, 21 bp, Homo sapiens
acaatcagtayggcaggaaca

SEQ ID NO: 30856 - DNA, 21 bp, Homo sapiens
tacaattcaaytagagatttg

SEQ ID NO: 30857 - DNA, 21 bp, Homo sapiens
gctaagagatmatcttaacaa

SEQ ID NO: 30858 - DNA, 21 bp, Homo sapiens
gaccattcttyttttcaggag

SEQ ID NO: 30859 - DNA, 21 bp, Homo sapiens
aagcaatagastagttcttca

SEQ ID NO: 30860 - DNA, 21 bp, Homo sapiens
tgtttttgctrtaatcttcag

SEQ ID NO: 30861 - DNA, 21 bp, Homo sapiens
caggtgcaatrtgctgtgtca

SEQ ID NO: 30862 - DNA, 21 bp, Homo sapiens
tctcattcacrcataatatct

SEQ ID NO: 30863 - DNA, 21 bp, Homo sapiens
aacagagaaargtttgtctct

SEQ ID NO: 30864 - DNA, 21 bp, Homo sapiens
cgagtccccarttacaaccaa

SEQ ID NO: 30865 - DNA, 21 bp, Homo sapiens
tcccaggtccrtaattgggtg

SEQ ID NO: 30866 - DNA, 21 bp, Homo sapiens
tgtcattcccygtacttattt

SEQ ID NO: 30867 - DNA, 21 bp, Homo sapiens
aagtcaacacrctcattacta

SEQ ID NO: 30868 - DNA, 21 bp, Homo sapiens
tatggaatccyatcaaaaaca

SEQ ID NO: 30869 - DNA, 21 bp, Homo sapiens
tccgactgatytgggtcataa

SEQ ID NO: 30870 - DNA, 21 bp, Homo sapiens
aacttaataamtgaatcatgc

SEQ ID NO: 30871 - DNA, 21 bp, Homo sapiens
gtgggcaatastaggccataa

SEQ ID NO: 30872 - DNA, 21 bp, Homo sapiens
gcctgaaacayatagccaaaa

SEQ ID NO: 30873 - DNA, 21 bp, Homo sapiens
actattctctytattttcaca

SEQ ID NO: 30874 - DNA, 21 bp, Homo sapiens
cagaaacaaamagtaactttc

SEQ ID NO: 30875 - DNA, 21 bp, Homo sapiens
agggaactgcrttgcatttct

SEQ ID NO: 30876 - DNA, 21 bp, Homo sapiens
tttatgtcagwtggttttgac

SEQ ID NO: 30877 - DNA, 21 bp, Homo sapiens
ggataatgccratggtctcac

SEQ ID NO: 30878 - DNA, 21 bp, Homo sapiens
catatccacayatataacttt

SEQ ID NO: 30879 - DNA, 21 bp, Homo sapiens
aacttcaatgyataggctttt

SEQ ID NO: 30880 - DNA, 21 bp, Homo sapiens
tataatcaaawttacaaaata

SEQ ID NO: 30881 - DNA, 21 bp, Homo sapiens
atgcctttgcrgttttaaaaa

SEQ ID NO: 30882 - DNA, 21 bp, Homo sapiens
gaatatattgrctgtggagca

SEQ ID NO: 30883 - DNA, 21 bp, Homo sapiens
ggaaatttcakgatcccattt

SEQ ID NO: 30884 - DNA, 21 bp, Homo sapiens
cctataagcgrtttaacacat

SEQ ID NO: 30885 - DNA, 21 bp, Homo sapiens
ctgaacacggyattttaaaac

SEQ ID NO: 30886 - DNA, 21 bp, Homo sapiens
ataaaatcagyactatccttg

SEQ ID NO: 30887 - DNA, 21 bp, Homo sapiens
ggaatttatgrtagaaggatc

SEQ ID NO: 30888 - DNA, 21 bp, Homo sapiens
gtcaatcagcraatttccact

SEQ ID NO: 30889 - DNA, 21 bp, Homo sapiens
gaggtacgacrtttaaaactg

SEQ ID NO: 30890 - DNA, 21 bp, Homo sapiens
tttcttctgtrtgtgtagggc

SEQ ID NO: 30891 - DNA, 21 bp, Homo sapiens
aaatctaaacyagtgaatata

SEQ ID NO: 30892 - DNA, 21 bp, Homo sapiens
catctaaaagktctgtataca

SEQ ID NO: 30893 - DNA, 21 bp, Homo sapiens
cctctactgtracagcaagga

SEQ ID NO: 30894 - DNA, 21 bp, Homo sapiens
tgggaactacrttaaagccca

SEQ ID NO: 30895 - DNA, 21 bp, Homo sapiens
tacacacaaasattcacagaa

SEQ ID NO: 30896 - DNA, 21 bp, Homo sapiens
tagaaaattgytcattctcca

SEQ ID NO: 30897 - DNA, 21 bp, Homo sapiens
ataaggaaatygaaaaataac

SEQ ID NO: 30898 - DNA, 21 bp, Homo sapiens
cacttagaaaygtaggttttt

SEQ ID NO: 30899 - DNA, 21 bp, Homo sapiens
gtacaccatayacagcttctt

SEQ ID NO: 30900 - DNA, 21 bp, Homo sapiens
taattaacagstccttcttct

SEQ ID NO: 30901 - DNA, 21 bp, Homo sapiens
tttatgtgtgyatcggttgta

SEQ ID NO: 30902 - DNA, 21 bp, Homo sapiens
gaaggggagasttaaaatcat

SEQ ID NO: 30903 - DNA, 21 bp, Homo sapiens
tcctcacaagkttcctaatgt

SEQ ID NO: 30904 - DNA, 21 bp, Homo sapiens
gataagagccygtgaacagtg

SEQ ID NO: 30905 - DNA, 21 bp, Homo sapiens
tagtcctaatrtctaaacgta

SEQ ID NO: 30906 - DNA, 21 bp, Homo sapiens
ttcctgccttycataaacttg

SEQ ID NO: 30907 - DNA, 21 bp, Homo sapiens
ctcagatatgytgtaaagatc

SEQ ID NO: 30908 - DNA, 21 bp, Homo sapiens
cctttccattmgatattctga

SEQ ID NO: 30909 - DNA, 21 bp, Homo sapiens
cttcagcaggrgacctcactc

SEQ ID NO: 30910 - DNA, 21 bp, Homo sapiens
gacaacgctgmacgcataggc

SEQ ID NO: 30911 - DNA, 21 bp, Homo sapiens
atgacagttcrgtctgctatc

SEQ ID NO: 30912 - DNA, 21 bp, Homo sapiens
tttgcaacccractttaccac

SEQ ID NO: 30913 - DNA, 21 bp, Homo sapiens
tctcacacackaatctttgcc

SEQ ID NO: 30914 - DNA, 21 bp, Homo sapiens
tattgtcttaygataaaattt

SEQ ID NO: 30915 - DNA, 21 bp, Homo sapiens
tttacgggtgsatgtgtgtat

SEQ ID NO: 30916 - DNA, 21 bp, Homo sapiens
ggaattgtatrtatcagtcct

SEQ ID NO: 30917 - DNA, 21 bp, Homo sapiens
tacagtcatcrtggaaggtga

SEQ ID NO: 30918 - DNA, 21 bp, Homo sapiens
ttgggctgagyttggtgcctt

SEQ ID NO: 30919 - DNA, 21 bp, Homo sapiens
gccgctggagragctgttcgc

SEQ ID NO: 30920 - DNA, 21 bp, Homo sapiens
ttagcacgttktcttgagtaa

SEQ ID NO: 30921 - DNA, 21 bp, Homo sapiens
ctggatttacrcctctatcct

SEQ ID NO: 30922 - DNA, 21 bp, Homo sapiens
taagtaagatmatctagtatt

SEQ ID NO: 30923 - DNA, 21 bp, Homo sapiens
caatgtacatkttgtgtaata

SEQ ID NO: 30924 - DNA, 21 bp, Homo sapiens
accagaactcrtatttctatg

SEQ ID NO: 30925 - DNA, 21 bp, Homo sapiens
gagaaataatrggagatggcc

SEQ ID NO: 30926 - DNA, 21 bp, Homo sapiens
tggaatatcakgttatggtac

SEQ ID NO: 30927 - DNA, 21 bp, Homo sapiens
ctggaaggaamctggggccta

SEQ ID NO: 30928 - DNA, 21 bp, Homo sapiens
atattgatttyaaagtgaggt

SEQ ID NO: 30929 - DNA, 21 bp, Homo sapiens
gcttgtgatgrtgatagagat

SEQ ID NO: 30930 - DNA, 21 bp, Homo sapiens
tctttacaackgagtataata

SEQ ID NO: 30931 - DNA, 21 bp, Homo sapiens
ggtagtttggkggaaaatctc

SEQ ID NO: 30932 - DNA, 21 bp, Homo sapiens
gctgattaaasggtgataagt

SEQ ID NO: 30933 - DNA, 21 bp, Homo sapiens
tgggttatgaytggaatagtc

SEQ ID NO: 30934 - DNA, 21 bp, Homo sapiens
gaatattacakaaaacagtgt

SEQ ID NO: 30935 - DNA, 21 bp, Homo sapiens
tatgtcttttytaaaggaaga

SEQ ID NO: 30936 - DNA, 21 bp, Homo sapiens
agggaaacatygcctagcagc

SEQ ID NO: 30937 - DNA, 21 bp, Homo sapiens
ataaaaaatgrgattttgagt

SEQ ID NO: 30938 - DNA, 21 bp, Homo sapiens
ttttgtaactrctctctcttc

SEQ ID NO: 30939 - DNA, 21 bp, Homo sapiens
gaaacttatgrgtattcttat

SEQ ID NO: 30940 - DNA, 21 bp, Homo sapiens
ttaaaaaatcmagtttcgatg

SEQ ID NO: 30941 - DNA, 21 bp, Homo sapiens
aaattagagayggtcaatagt

SEQ ID NO: 30942 - DNA, 21 bp, Homo sapiens
gctgtccaacmaagagtggag

SEQ ID NO: 30943 - DNA, 21 bp, Homo sapiens
acgcatggatrtgcatagata

SEQ ID NO: 30944 - DNA, 21 bp, Homo sapiens
atttacacacrttgttttcta

SEQ ID NO: 30945 - DNA, 21 bp, Homo sapiens
attgaagaaasaatagattta

SEQ ID NO: 30946 - DNA, 21 bp, Homo sapiens
ctcaatagcasaaaaatctaa

SEQ ID NO: 30947 - DNA, 21 bp, Homo sapiens
ttatatcattwtctgctcatt

SEQ ID NO: 30948 - DNA, 21 bp, Homo sapiens
ctataggcctrtcgtcattta

SEQ ID NO: 30949 - DNA, 21 bp, Homo sapiens
cacccggaaaragtgaatcac

SEQ ID NO: 30950 - DNA, 21 bp, Homo sapiens
aaaaacaatgrgaatgtgtat

SEQ ID NO: 30951 - DNA, 21 bp, Homo sapiens
ttatgagatcycaaggctatc

SEQ ID NO: 30952 - DNA, 21 bp, Homo sapiens
tgattaaaatycaattcagac

SEQ ID NO: 30953 - DNA, 21 bp, Homo sapiens
cattattttcrttgctgtaga

SEQ ID NO: 30954 - DNA, 21 bp, Homo sapiens
agggtagtttyatacttttag

SEQ ID NO: 30955 - DNA, 21 bp, Homo sapiens
ttccaaagtcytagaataacg

SEQ ID NO: 30956 - DNA, 21 bp, Homo sapiens
tgagtggtagyctaccaaaag

SEQ ID NO: 30957 - DNA, 21 bp, Homo sapiens
tgcaaagcagmgtctatagac

SEQ ID NO: 30958 - DNA, 21 bp, Homo sapiens
ttgggtaaccrtattgagccc

SEQ ID NO: 30959 - DNA, 21 bp, Homo sapiens
gtactcccagyctaggcatat

SEQ ID NO: 30960 - DNA, 21 bp, Homo sapiens
aatacacaacrcctagaaata

SEQ ID NO: 30961 - DNA, 21 bp, Homo sapiens
ccgagcacccrctgactgaca

SEQ ID NO: 30962 - DNA, 21 bp, Homo sapiens
cacacattcaycaggtatgca

SEQ ID NO: 30963 - DNA, 21 bp, Homo sapiens
gtatggaaaasacatggctgc

SEQ ID NO: 30964 - DNA, 21 bp, Homo sapiens
aaaattatcaytgcaccagct

SEQ ID NO: 30965 - DNA, 21 bp, Homo sapiens
agaagggacawgattgtggaa

SEQ ID NO: 30966 - DNA, 21 bp, Homo sapiens
ctggctgccamccaaagactt

SEQ ID NO: 30967 - DNA, 21 bp, Homo sapiens
attctaatggkttgaagagtg

SEQ ID NO: 30968 - DNA, 21 bp, Homo sapiens
cactacattasagtcagtgag

SEQ ID NO: 30969 - DNA, 21 bp, Homo sapiens
tcagaggttcmataattaggt

SEQ ID NO: 30970 - DNA, 21 bp, Homo sapiens
tagcagatcartttggagaaa

SEQ ID NO: 30971 - DNA, 21 bp, Homo sapiens
tattctaagasagcctcagga

SEQ ID NO: 30972 - DNA, 21 bp, Homo sapiens
tgcataccctrtttgatttat

SEQ ID NO: 30973 - DNA, 21 bp, Homo sapiens
aggcagaaatktcattgttaa

SEQ ID NO: 30974 - DNA, 21 bp, Homo sapiens
ctgtgtacctragttcctgtt

SEQ ID NO: 30975 - DNA, 21 bp, Homo sapiens
tcttctgaccmttccagcctc

SEQ ID NO: 30976 - DNA, 21 bp, Homo sapiens
tcagtcataascatgcagtta

SEQ ID NO: 30977 - DNA, 21 bp, Homo sapiens
aactaggagcracctatcttg

SEQ ID NO: 30978 - DNA, 21 bp, Homo sapiens
ttctgattggrgcacttttaa

SEQ ID NO: 30979 - DNA, 21 bp, Homo sapiens
tgagaacatgsaaatgaattg

SEQ ID NO: 30980 - DNA, 21 bp, Homo sapiens
ctatgcccagsagaaccctag

SEQ ID NO: 30981 - DNA, 21 bp, Homo sapiens
agaacacttgraactctgatg

SEQ ID NO: 30982 - DNA, 21 bp, Homo sapiens
ttttatagcastattcaagcc

SEQ ID NO: 30983 - DNA, 21 bp, Homo sapiens
tttgggttggygataccctag

SEQ ID NO: 30984 - DNA, 21 bp, Homo sapiens
agcaaacatgwgctttatctc

SEQ ID NO: 30985 - DNA, 21 bp, Homo sapiens
agacagcctgyatcccttttg

SEQ ID NO: 30986 - DNA, 21 bp, Homo sapiens
cactttcaccrtgatttacat

SEQ ID NO: 30987 - DNA, 21 bp, Homo sapiens
aaagcccacarataagtctgt

SEQ ID NO: 30988 - DNA, 21 bp, Homo sapiens
attcttccatytcctaggtta

SEQ ID NO: 30989 - DNA, 21 bp, Homo sapiens
ggaatacagtscacaaaagga

SEQ ID NO: 30990 - DNA, 21 bp, Homo sapiens
ggatacatatrtaggtagtga

SEQ ID NO: 30991 - DNA, 21 bp, Homo sapiens
tttctttttcrtcttgattgg

SEQ ID NO: 30992 - DNA, 21 bp, Homo sapiens
ttttttccggrgtagtaagtt

SEQ ID NO: 30993 - DNA, 21 bp, Homo sapiens
aataaagtatrtaaccaaata

SEQ ID NO: 30994 - DNA, 21 bp, Homo sapiens
gaagtggcaaraaggggagga

SEQ ID NO: 30995 - DNA, 21 bp, Homo sapiens
tgctgtcattsaccgcagggg

SEQ ID NO: 30996 - DNA, 21 bp, Homo sapiens
gtcagtcaagsctgttatttg

SEQ ID NO: 30997 - DNA, 21 bp, Homo sapiens
aaatcattcaygggacaatta

SEQ ID NO: 30998 - DNA, 21 bp, Homo sapiens
tttcaaggaaytgaagtgaca

SEQ ID NO: 30999 - DNA, 21 bp, Homo sapiens
gatccaaaacstacttttagg

SEQ ID NO: 31000 - DNA, 21 bp, Homo sapiens
caattctatcrgactccaaac

SEQ ID NO: 31001 - DNA, 21 bp, Homo sapiens
tcatgatgtckaggatatata

SEQ ID NO: 31002 - DNA, 21 bp, Homo sapiens
tgtgtctttgraaagatttct

SEQ ID NO: 31003 - DNA, 21 bp, Homo sapiens
ctttgtttgtrctcacactta

SEQ ID NO: 31004 - DNA, 21 bp, Homo sapiens
gtaacttattytgtagtttga

SEQ ID NO: 31005 - DNA, 21 bp, Homo sapiens
aggttgctgayatttttaccc

SEQ ID NO: 31006 - DNA, 21 bp, Homo sapiens
gagacactagyacatttttgg

SEQ ID NO: 31007 - DNA, 21 bp, Homo sapiens
ttctactctcygctttattct

SEQ ID NO: 31008 - DNA, 21 bp, Homo sapiens
agcaaagatgrtttggtagta

SEQ ID NO: 31009 - DNA, 21 bp, Homo sapiens
caattattctstgcagcaatg

SEQ ID NO: 31010 - DNA, 21 bp, Homo sapiens
taagtgccagkttcaacaatt

SEQ ID NO: 31011 - DNA, 21 bp, Homo sapiens
accacatgctyagatctgcac

SEQ ID NO: 31012 - DNA, 21 bp, Homo sapiens
agatattgcastaaaaaattc

SEQ ID NO: 31013 - DNA, 21 bp, Homo sapiens
actatactgcrtactactcat

SEQ ID NO: 31014 - DNA, 21 bp, Homo sapiens
gagatggctckggtgacttct

SEQ ID NO: 31015 - DNA, 21 bp, Homo sapiens
agactgttgtmtcatttcttt

SEQ ID NO: 31016 - DNA, 21 bp, Homo sapiens
ctttaaagcaytaagcctata

SEQ ID NO: 31017 - DNA, 21 bp, Homo sapiens
ccattaatcgkttccatccat

SEQ ID NO: 31018 - DNA, 21 bp, Homo sapiens
gactattttcwtcatatttac

SEQ ID NO: 31019 - DNA, 21 bp, Homo sapiens
tctgaaaatcrccaatgctga

SEQ ID NO: 31020 - DNA, 21 bp, Homo sapiens
agtatagctcrtaacattaaa

SEQ ID NO: 31021 - DNA, 21 bp, Homo sapiens
gtggttatgcyaccaacttga

SEQ ID NO: 31022 - DNA, 21 bp, Homo sapiens
caattgtcttyctaattctgt

SEQ ID NO: 31023 - DNA, 21 bp, Homo sapiens
ggcaggaggartgaaaataac

SEQ ID NO: 31024 - DNA, 21 bp, Homo sapiens
acaaagaacaragaccatgta

SEQ ID NO: 31025 - DNA, 21 bp, Homo sapiens
aagcagaatayggtgatccta

SEQ ID NO: 31026 - DNA, 21 bp, Homo sapiens
ttcaatggccwagccttttga

SEQ ID NO: 31027 - DNA, 21 bp, Homo sapiens
aagtaataaartgcttccagt

SEQ ID NO: 31028 - DNA, 21 bp, Homo sapiens
caaagttttaycttccattga

SEQ ID NO: 31029 - DNA, 21 bp, Homo sapiens
attcttattayacctctttct

SEQ ID NO: 31030 - DNA, 21 bp, Homo sapiens
aggaggtaacwtggaatctaa

SEQ ID NO: 31031 - DNA, 21 bp, Homo sapiens
ttcagatggayagccagtagt

SEQ ID NO: 31032 - DNA, 21 bp, Homo sapiens
agcaatctgargcttagtctg

SEQ ID NO: 31033 - DNA, 21 bp, Homo sapiens
tttatttgcayagtagacata

SEQ ID NO: 31034 - DNA, 21 bp, Homo sapiens
tatatttgtcwaagacttcca

SEQ ID NO: 31035 - DNA, 21 bp, Homo sapiens
ttcaaatgttyattccctaaa

SEQ ID NO: 31036 - DNA, 21 bp, Homo sapiens
cacatctttcyttttgttact

SEQ ID NO: 31037 - DNA, 21 bp, Homo sapiens
gttgcttaatrtagcctgaat

SEQ ID NO: 31038 - DNA, 21 bp, Homo sapiens
gggctttcctyctaaaatgcc

SEQ ID NO: 31039 - DNA, 21 bp, Homo sapiens
actggggtgtrtttgtggaat

SEQ ID NO: 31040 - DNA, 21 bp, Homo sapiens
aatgcacagtscagccaagcg

SEQ ID NO: 31041 - DNA, 21 bp, Homo sapiens
agatcaagagkaacgtcctcc

SEQ ID NO: 31042 - DNA, 21 bp, Homo sapiens
atggataacamccatgaagct

SEQ ID NO: 31043 - DNA, 21 bp, Homo sapiens
tattaggtaargcttcttgat

SEQ ID NO: 31044 - DNA, 21 bp, Homo sapiens
gtaactagaarcaccattggt

SEQ ID NO: 31045 - DNA, 21 bp, Homo sapiens
gtcaccccacyattgatgttc

SEQ ID NO: 31046 - DNA, 21 bp, Homo sapiens
tttaagctatrcagatgtctg

SEQ ID NO: 31047 - DNA, 21 bp, Homo sapiens
gtaaatgtctstactatgcca

SEQ ID NO: 31048 - DNA, 21 bp, Homo sapiens
ctgctgtcaakaaatttctat

SEQ ID NO: 31049 - DNA, 21 bp, Homo sapiens
ccaagagagtrctaactcagt

SEQ ID NO: 31050 - DNA, 21 bp, Homo sapiens
tttaaaatgtrtctctctgtg

SEQ ID NO: 31051 - DNA, 21 bp, Homo sapiens
ctgcatgacaygatctttttt

SEQ ID NO: 31052 - DNA, 21 bp, Homo sapiens
tacagatgttrtttaagaata

SEQ ID NO: 31053 - DNA, 21 bp, Homo sapiens
cccactgatgrttacttcata

SEQ ID NO: 31054 - DNA, 21 bp, Homo sapiens
tcagtgtaatragcagctcag

SEQ ID NO: 31055 - DNA, 21 bp, Homo sapiens
cagcaatcaayttcatgtacc

SEQ ID NO: 31056 - DNA, 21 bp, Homo sapiens
ggctagttttyggaaggcaat

SEQ ID NO: 31057 - DNA, 21 bp, Homo sapiens
gcaatgaagayattggactga

SEQ ID NO: 31058 - DNA, 21 bp, Homo sapiens
caaatccaagrcccactgata

SEQ ID NO: 31059 - DNA, 21 bp, Homo sapiens
tgggtagttaytgaattccac

SEQ ID NO: 31060 - DNA, 21 bp, Homo sapiens
agcaggcacargcacttggaa

SEQ ID NO: 31061 - DNA, 21 bp, Homo sapiens
taaggagttayttgactaggc

SEQ ID NO: 31062 - DNA, 21 bp, Homo sapiens
tgagtccttgrcttaggaaat

SEQ ID NO: 31063 - DNA, 21 bp, Homo sapiens
aaaaattgggygtgactttat

SEQ ID NO: 31064 - DNA, 21 bp, Homo sapiens
caaggagacasggtcatttcc

SEQ ID NO: 31065 - DNA, 21 bp, Homo sapiens
agtcatcaaaragctgtctcc

SEQ ID NO: 31066 - DNA, 21 bp, Homo sapiens
tagacctccaytggttctcaa

SEQ ID NO: 31067 - DNA, 21 bp, Homo sapiens
ctttcacatayagttacagtt

SEQ ID NO: 31068 - DNA, 21 bp, Homo sapiens
gccagaaaagycaaaaagata

SEQ ID NO: 31069 - DNA, 21 bp, Homo sapiens
tgatctccagyttctgttttt

SEQ ID NO: 31070 - DNA, 21 bp, Homo sapiens
aaaaatcaaaycttagaccag

SEQ ID NO: 31071 - DNA, 21 bp, Homo sapiens
atattagcttyatcacacacc

SEQ ID NO: 31072 - DNA, 21 bp, Homo sapiens
taatgaaatascctcaaatgc

SEQ ID NO: 31073 - DNA, 21 bp, Homo sapiens
acaggattctyatttgcaagc

SEQ ID NO: 31074 - DNA, 21 bp, Homo sapiens
caatagagaawggctaactta

SEQ ID NO: 31075 - DNA, 21 bp, Homo sapiens
gagttcaaggsattagggaga

SEQ ID NO: 31076 - DNA, 21 bp, Homo sapiens
tcgaggcaacrttttggggtt

SEQ ID NO: 31077 - DNA, 21 bp, Homo sapiens
aggaagttatygtgcttctgc

SEQ ID NO: 31078 - DNA, 21 bp, Homo sapiens
tggaggatacygtgttaatgt

SEQ ID NO: 31079 - DNA, 21 bp, Homo sapiens
ctgccacaacrgccctctctg

SEQ ID NO: 31080 - DNA, 21 bp, Homo sapiens
aacagcacctrgacacgcatt

SEQ ID NO: 31081 - DNA, 21 bp, Homo sapiens
cttcatttatygagggcactc

SEQ ID NO: 31082 - DNA, 21 bp, Homo sapiens
atttccttcgytatcattagg

SEQ ID NO: 31083 - DNA, 21 bp, Homo sapiens
cacataagaarcatattcagc

SEQ ID NO: 31084 - DNA, 21 bp, Homo sapiens
gaagggaccasgtattctcca

SEQ ID NO: 31085 - DNA, 21 bp, Homo sapiens
tggggtcgctstgcatgcaac

SEQ ID NO: 31086 - DNA, 21 bp, Homo sapiens
ccctcatccaygctagatcac

SEQ ID NO: 31087 - DNA, 21 bp, Homo sapiens
agaacattcaracaatacaaa

SEQ ID NO: 31088 - DNA, 21 bp, Homo sapiens
aaggatgagamctcaacaggc

SEQ ID NO: 31089 - DNA, 21 bp, Homo sapiens
aaatctttccyggtcttagat

SEQ ID NO: 31090 - DNA, 21 bp, Homo sapiens
ccctggccacsacgagcactt

SEQ ID NO: 31091 - DNA, 21 bp, Homo sapiens
atggagagcakaattgataaa

SEQ ID NO: 31092 - DNA, 21 bp, Homo sapiens
agattcatcartgagtgtcta

SEQ ID NO: 31093 - DNA, 21 bp, Homo sapiens
ataaacttgtrgtcatgattg

SEQ ID NO: 31094 - DNA, 21 bp, Homo sapiens
tgtgttgtacrgatgaatgtt

SEQ ID NO: 31095 - DNA, 21 bp, Homo sapiens
tacgtgtctgyctgggatgct

SEQ ID NO: 31096 - DNA, 21 bp, Homo sapiens
aagaaagtacrttgatggtgt

SEQ ID NO: 31097 - DNA, 21 bp, Homo sapiens
aaaaaaatctrggatctaact

SEQ ID NO: 31098 - DNA, 21 bp, Homo sapiens
ctttgcataarccaattataa

SEQ ID NO: 31099 - DNA, 21 bp, Homo sapiens
attatatttgkcctttagaac

SEQ ID NO: 31100 - DNA, 21 bp, Homo sapiens
tctgtatttaytgaatgcttt

SEQ ID NO: 31101 - DNA, 21 bp, Homo sapiens
gagtagagaayatcgtcaagc

SEQ ID NO: 31102 - DNA, 21 bp, Homo sapiens
ctcagaccacstgagagcaga

SEQ ID NO: 31103 - DNA, 21 bp, Homo sapiens
agatgatacarcgtacctttt

SEQ ID NO: 31104 - DNA, 21 bp, Homo sapiens
aactaaaaagwgtgaagaata

SEQ ID NO: 31105 - DNA, 21 bp, Homo sapiens
gatgaagctaygaactgtttt

SEQ ID NO: 31106 - DNA, 21 bp, Homo sapiens
tattttgtcayttgcttgtta

SEQ ID NO: 31107 - DNA, 21 bp, Homo sapiens
ctgtcacttayaggactgtac

SEQ ID NO: 31108 - DNA, 21 bp, Homo sapiens
cacctctctgragtagtttct

SEQ ID NO: 31109 - DNA, 21 bp, Homo sapiens
gcgttaaagcwttttctcaaa

SEQ ID NO: 31110 - DNA, 21 bp, Homo sapiens
ttcaaaatagyataggtcata

SEQ ID NO: 31111 - DNA, 21 bp, Homo sapiens
tgaagacagasctcctgtttg

SEQ ID NO: 31112 - DNA, 21 bp, Homo sapiens
agtgaaattcytgtttgtaat

SEQ ID NO: 31113 - DNA, 21 bp, Homo sapiens
tctagattctsttagaagaaa

SEQ ID NO: 31114 - DNA, 21 bp, Homo sapiens
ggaaagtcagrtaatgaatta

SEQ ID NO: 31115 - DNA, 21 bp, Homo sapiens
aatttcttcarcgaggttata

SEQ ID NO: 31116 - DNA, 21 bp, Homo sapiens
ttttcctccaygctttactca

SEQ ID NO: 31117 - DNA, 21 bp, Homo sapiens
tctaaagaatktttaatatcc

SEQ ID NO: 31118 - DNA, 21 bp, Homo sapiens
gaggaagaacratacaagttc

SEQ ID NO: 31119 - DNA, 21 bp, Homo sapiens
aaagtggaaaragaattgatg

SEQ ID NO: 31120 - DNA, 21 bp, Homo sapiens
ctagccttatkgaatattggg

SEQ ID NO: 31121 - DNA, 21 bp, Homo sapiens
tgaattcttasattatgtcat

SEQ ID NO: 31122 - DNA, 21 bp, Homo sapiens
agcatcattayatacttcaat

SEQ ID NO: 31123 - DNA, 21 bp, Homo sapiens
caggaggtgayaagtatcatt

SEQ ID NO: 31124 - DNA, 21 bp, Homo sapiens
agatttataaygaaagggtca

SEQ ID NO: 31125 - DNA, 21 bp, Homo sapiens
ataggctttakgtttgaacct

SEQ ID NO: 31126 - DNA, 21 bp, Homo sapiens
aatacatgtayttatttttgc

SEQ ID NO: 31127 - DNA, 21 bp, Homo sapiens
gttgcaggaamatctgatatc

SEQ ID NO: 31128 - DNA, 21 bp, Homo sapiens
aggtcctgggygaaagctttt

SEQ ID NO: 31129 - DNA, 21 bp, Homo sapiens
ccagatacatsttgtatatat

SEQ ID NO: 31130 - DNA, 21 bp, Homo sapiens
atgtgttgaayaatggagcaa

SEQ ID NO: 31131 - DNA, 21 bp, Homo sapiens
ctgacctcatragatcctttc

SEQ ID NO: 31132 - DNA, 21 bp, Homo sapiens
ggtccagaccrgagtttaaga

SEQ ID NO: 31133 - DNA, 21 bp, Homo sapiens
gtcagaaaagycagtttagtc

SEQ ID NO: 31134 - DNA, 21 bp, Homo sapiens
ctcatgaatgytaagcatacg

SEQ ID NO: 31135 - DNA, 21 bp, Homo sapiens
aaacaattatrgtaggttttt

SEQ ID NO: 31136 - DNA, 21 bp, Homo sapiens
tgggagtgaamgcgagccgcc

SEQ ID NO: 31137 - DNA, 21 bp, Homo sapiens
tattattatcyagggacagtg

SEQ ID NO: 31138 - DNA, 21 bp, Homo sapiens
ctggtatgtcsaggattacgt

SEQ ID NO: 31139 - DNA, 21 bp, Homo sapiens
cactttattcrtctgatattt

SEQ ID NO: 31140 - DNA, 21 bp, Homo sapiens
agctcagagaraacgtcgaaa

SEQ ID NO: 31141 - DNA, 21 bp, Homo sapiens
ggagatggggktgcccaaaga

SEQ ID NO: 31142 - DNA, 21 bp, Homo sapiens
taaattataartaaggtcaga

SEQ ID NO: 31143 - DNA, 21 bp, Homo sapiens
attttcaatcyttacgacatt

SEQ ID NO: 31144 - DNA, 21 bp, Homo sapiens
aaaataacttytagtaaacaa

SEQ ID NO: 31145 - DNA, 21 bp, Homo sapiens
cagtgattccygaatagcaca

SEQ ID NO: 31146 - DNA, 21 bp, Homo sapiens
ctctatatacmtatatctaac

SEQ ID NO: 31147 - DNA, 21 bp, Homo sapiens
gcagatgaacrtgccaagatg

SEQ ID NO: 31148 - DNA, 21 bp, Homo sapiens
tatgatttctyaaagaactat

SEQ ID NO: 31149 - DNA, 21 bp, Homo sapiens
ataaaaaatcrgcaaaccagc

SEQ ID NO: 31150 - DNA, 21 bp, Homo sapiens
ctgacaattastgtactgtga

SEQ ID NO: 31151 - DNA, 21 bp, Homo sapiens
agtaatgatgrcagtgatatt

SEQ ID NO: 31152 - DNA, 21 bp, Homo sapiens
gctggatgacrataagcctgg

SEQ ID NO: 31153 - DNA, 21 bp, Homo sapiens
ataaaactttrgctgcttaac

SEQ ID NO: 31154 - DNA, 21 bp, Homo sapiens
caggggccagrgcacagttgt

SEQ ID NO: 31155 - DNA, 21 bp, Homo sapiens
catgatggatraataagaaac

SEQ ID NO: 31156 - DNA, 21 bp, Homo sapiens
aagtaagctcrtgaagctatt

SEQ ID NO: 31157 - DNA, 21 bp, Homo sapiens
gcattatactrtctctgtaag

SEQ ID NO: 31158 - DNA, 21 bp, Homo sapiens
tcatttgtaargctcctgtga

SEQ ID NO: 31159 - DNA, 21 bp, Homo sapiens
gtatcaagggygatccatgaa

SEQ ID NO: 31160 - DNA, 21 bp, Homo sapiens
tgacattaagrgcctctggct

SEQ ID NO: 31161 - DNA, 21 bp, Homo sapiens
gcctagctcaytcttctccac

SEQ ID NO: 31162 - DNA, 21 bp, Homo sapiens
ggtatttgtaktatgcttttg

SEQ ID NO: 31163 - DNA, 21 bp, Homo sapiens
tttcacagaawtggaaataca

SEQ ID NO: 31164 - DNA, 21 bp, Homo sapiens
aggacccctaycaggactact

SEQ ID NO: 31165 - DNA, 21 bp, Homo sapiens
taaggcctggrtgccctgctg

SEQ ID NO: 31166 - DNA, 21 bp, Homo sapiens
ttcagatcacrcttttagtag

SEQ ID NO: 31167 - DNA, 21 bp, Homo sapiens
tccaaacaagktatttattaa

SEQ ID NO: 31168 - DNA, 21 bp, Homo sapiens
aacagccattktatacaggct

SEQ ID NO: 31169 - DNA, 21 bp, Homo sapiens
aaagccacggyacctttgtag

SEQ ID NO: 31170 - DNA, 21 bp, Homo sapiens
gagggcattcrggcattcggc

SEQ ID NO: 31171 - DNA, 21 bp, Homo sapiens
ctcttttgccrtataacataa

SEQ ID NO: 31172 - DNA, 21 bp, Homo sapiens
gcaattgtgcycagtactctg

SEQ ID NO: 31173 - DNA, 21 bp, Homo sapiens
ggtctgtttcrgatggatcta

SEQ ID NO: 31174 - DNA, 21 bp, Homo sapiens
gcaatattttktttcactctc

SEQ ID NO: 31175 - DNA, 21 bp, Homo sapiens
gtcaaagactyacttagctgg

SEQ ID NO: 31176 - DNA, 21 bp, Homo sapiens
acaacagaatyccagtgcaat

SEQ ID NO: 31177 - DNA, 21 bp, Homo sapiens
aatgcaaataycttctttatt

SEQ ID NO: 31178 - DNA, 21 bp, Homo sapiens
acaaaaagtartaagtacatc

SEQ ID NO: 31179 - DNA, 21 bp, Homo sapiens
atatcacctcrgataccataa

SEQ ID NO: 31180 - DNA, 21 bp, Homo sapiens
ccctgtagccratcatatgtg

SEQ ID NO: 31181 - DNA, 21 bp, Homo sapiens
aaactttagamcaccatggaa

SEQ ID NO: 31182 - DNA, 21 bp, Homo sapiens
ttatagaacamcacatgttag

SEQ ID NO: 31183 - DNA, 21 bp, Homo sapiens
ggagcccagcrgcccttactc

SEQ ID NO: 31184 - DNA, 21 bp, Homo sapiens
tataggctgayggctttaatc

SEQ ID NO: 31185 - DNA, 21 bp, Homo sapiens
agagtatgaaytggaaccact

SEQ ID NO: 31186 - DNA, 21 bp, Homo sapiens
atatttccttygtgatcatca

SEQ ID NO: 31187 - DNA, 21 bp, Homo sapiens
agcactgaccytgacttccag

SEQ ID NO: 31188 - DNA, 21 bp, Homo sapiens
gccctgaatcyaactgcaggc

SEQ ID NO: 31189 - DNA, 21 bp, Homo sapiens
atgaggaaccrgactcacaat

SEQ ID NO: 31190 - DNA, 21 bp, Homo sapiens
gcaagaaagtstgagatgtga

SEQ ID NO: 31191 - DNA, 21 bp, Homo sapiens
gtagcggtagyggtgaacaaa

SEQ ID NO: 31192 - DNA, 21 bp, Homo sapiens
ggtttaaattmggtagaaaat

SEQ ID NO: 31193 - DNA, 21 bp, Homo sapiens
gctggggcaasttgagggact

SEQ ID NO: 31194 - DNA, 21 bp, Homo sapiens
ttcaggctcayactagaggtt

SEQ ID NO: 31195 - DNA, 21 bp, Homo sapiens
tgaataagctstaaggtggtg

SEQ ID NO: 31196 - DNA, 21 bp, Homo sapiens
ttgtgatgaayatgttggctt

SEQ ID NO: 31197 - DNA, 21 bp, Homo sapiens
aaaacaaggtragcctgtgtt

SEQ ID NO: 31198 - DNA, 21 bp, Homo sapiens
tgcaaattcartgattaattc

SEQ ID NO: 31199 - DNA, 21 bp, Homo sapiens
tgccattcacygttcacatgc

SEQ ID NO: 31200 - DNA, 21 bp, Homo sapiens
aaacccttctsaccttgccct

SEQ ID NO: 31201 - DNA, 21 bp, Homo sapiens
aggaagtgaarcccaggaccc

SEQ ID NO: 31202 - DNA, 21 bp, Homo sapiens
tgctcatcaastcggggaagt

SEQ ID NO: 31203 - DNA, 21 bp, Homo sapiens
cagctgtcagrttgtcaaggg

SEQ ID NO: 31204 - DNA, 21 bp, Homo sapiens
gcccacagcamcctcaaacct

SEQ ID NO: 31205 - DNA, 21 bp, Homo sapiens
catggacttayagttacacaa

SEQ ID NO: 31206 - DNA, 21 bp, Homo sapiens
tatcaggttamtgaagaaaga

SEQ ID NO: 31207 - DNA, 21 bp, Homo sapiens
acaattagccwgatagtagaa

SEQ ID NO: 31208 - DNA, 21 bp, Homo sapiens
ctgctaagcckcgcccattac

SEQ ID NO: 31209 - DNA, 21 bp, Homo sapiens
tatttccattsaacttgaggg

SEQ ID NO: 31210 - DNA, 21 bp, Homo sapiens
gcacacccacycccaacagac

SEQ ID NO: 31211 - DNA, 21 bp, Homo sapiens
cctggccagasagatccctgt

SEQ ID NO: 31212 - DNA, 21 bp, Homo sapiens
ataatctcgcmaactacctta

SEQ ID NO: 31213 - DNA, 21 bp, Homo sapiens
caagacatagmccatgccaca

SEQ ID NO: 31214 - DNA, 21 bp, Homo sapiens
gcgaggaaacygcccgtctcc

SEQ ID NO: 31215 - DNA, 21 bp, Homo sapiens
tattctgcacyggctggcccg

SEQ ID NO: 31216 - DNA, 21 bp, Homo sapiens
ctctctgataycatttattta

SEQ ID NO: 31217 - DNA, 21 bp, Homo sapiens
tacaggttggwaaagcatttg

SEQ ID NO: 31218 - DNA, 21 bp, Homo sapiens
gaggagacccrgaaagaggtg

SEQ ID NO: 31219 - DNA, 21 bp, Homo sapiens
actcattattycagaaaattc

SEQ ID NO: 31220 - DNA, 21 bp, Homo sapiens
ctgtcagtacyaggaaataag

SEQ ID NO: 31221 - DNA, 21 bp, Homo sapiens
ggatttttacrttatttccct

SEQ ID NO: 31222 - DNA, 21 bp, Homo sapiens
ctggagatatrcatttctgtg

SEQ ID NO: 31223 - DNA, 21 bp, Homo sapiens
cagctaaccaygagcaagtaa

SEQ ID NO: 31224 - DNA, 21 bp, Homo sapiens
gagcttccttygtatttactg

SEQ ID NO: 31225 - DNA, 21 bp, Homo sapiens
ctggcatgggmacaggtgagg

SEQ ID NO: 31226 - DNA, 21 bp, Homo sapiens
taagtatccamctatctatcc

SEQ ID NO: 31227 - DNA, 21 bp, Homo sapiens
agcaactgctraggctgcctt

SEQ ID NO: 31228 - DNA, 21 bp, Homo sapiens
aggcttgcaaygccctctaca

SEQ ID NO: 31229 - DNA, 21 bp, Homo sapiens
cactctccagktcccataggt

SEQ ID NO: 31230 - DNA, 21 bp, Homo sapiens
tcacacacagwctggcccata

SEQ ID NO: 31231 - DNA, 21 bp, Homo sapiens
actattggtaygctatttctg

SEQ ID NO: 31232 - DNA, 21 bp, Homo sapiens
gaaatactgtkaagctggcat

SEQ ID NO: 31233 - DNA, 21 bp, Homo sapiens
cagtgaaaatkaactgctcgg

SEQ ID NO: 31234 - DNA, 21 bp, Homo sapiens
cagctgccggygttctcaatg

SEQ ID NO: 31235 - DNA, 21 bp, Homo sapiens
cattctgaccrttcaagaata

SEQ ID NO: 31236 - DNA, 21 bp, Homo sapiens
aattcatacayaatcacttgt

SEQ ID NO: 31237 - DNA, 21 bp, Homo sapiens
attttggtcaygtgtttgtta

SEQ ID NO: 31238 - DNA, 21 bp, Homo sapiens
ccctttctctrtgttgctggg

SEQ ID NO: 31239 - DNA, 21 bp, Homo sapiens
cagaactcagygtcttgactc

SEQ ID NO: 31240 - DNA, 21 bp, Homo sapiens
tgtactatgcrgagtccatgt

SEQ ID NO: 31241 - DNA, 21 bp, Homo sapiens
ccctgttttayagagttcttt

SEQ ID NO: 31242 - DNA, 21 bp, Homo sapiens
catgcctggaratatagtaat

SEQ ID NO: 31243 - DNA, 21 bp, Homo sapiens
acagttaaacrtataacattg

SEQ ID NO: 31244 - DNA, 21 bp, Homo sapiens
cttttagctcratgcctgtca

SEQ ID NO: 31245 - DNA, 21 bp, Homo sapiens
tctaactcctkcatttatata

SEQ ID NO: 31246 - DNA, 21 bp, Homo sapiens
agagtagcttyccttcttcca

SEQ ID NO: 31247 - DNA, 21 bp, Homo sapiens
cgaagaaacayaccaggggga

SEQ ID NO: 31248 - DNA, 21 bp, Homo sapiens
tgtaatgctcrtaacaagttt

SEQ ID NO: 31249 - DNA, 21 bp, Homo sapiens
ttaggaatatraggccatacc

SEQ ID NO: 31250 - DNA, 21 bp, Homo sapiens
ccaccgcgctyggcccatttg

SEQ ID NO: 31251 - DNA, 21 bp, Homo sapiens
taatgctatcrgggaatagga

SEQ ID NO: 31252 - DNA, 21 bp, Homo sapiens
tctctcttctyagcctttaca

SEQ ID NO: 31253 - DNA, 21 bp, Homo sapiens
cctatcatcayagtataaata

SEQ ID NO: 31254 - DNA, 21 bp, Homo sapiens
aacgaagactyagcctgagaa

SEQ ID NO: 31255 - DNA, 21 bp, Homo sapiens
ttgtctctgaygttccatgcc

SEQ ID NO: 31256 - DNA, 21 bp, Homo sapiens
ggggactctayggtgatatgg

SEQ ID NO: 31257 - DNA, 21 bp, Homo sapiens
caggtgaggcraaaggccttg

SEQ ID NO: 31258 - DNA, 21 bp, Homo sapiens
ggttacaagasaggaagggac

SEQ ID NO: 31259 - DNA, 21 bp, Homo sapiens
aaaagcccccsttatccaaga

SEQ ID NO: 31260 - DNA, 21 bp, Homo sapiens
ggctgtccatwgtttctacct

SEQ ID NO: 31261 - DNA, 21 bp, Homo sapiens
tccctagctcmtttgaaatca

SEQ ID NO: 31262 - DNA, 21 bp, Homo sapiens
acagtctggcrcaagaaatac

SEQ ID NO: 31263 - DNA, 21 bp, Homo sapiens
catgggattcrggacacctaa

SEQ ID NO: 31264 - DNA, 21 bp, Homo sapiens
gggcccaagcrgttactctaa

SEQ ID NO: 31265 - DNA, 21 bp, Homo sapiens
actagatgaaytgctgcatgc

SEQ ID NO: 31266 - DNA, 21 bp, Homo sapiens
agcctatagcrgtggagatgc

SEQ ID NO: 31267 - DNA, 21 bp, Homo sapiens
tattcaattaytggttcagta

SEQ ID NO: 31268 - DNA, 21 bp, Homo sapiens
tgagtggggcrgaccacaagg

SEQ ID NO: 31269 - DNA, 21 bp, Homo sapiens
gcctcctaaakaagacactga

SEQ ID NO: 31270 - DNA, 21 bp, Homo sapiens
tctgaaaggaytgtcatctgc

SEQ ID NO: 31271 - DNA, 21 bp, Homo sapiens
catagcctacrgttacttctg

SEQ ID NO: 31272 - DNA, 21 bp, Homo sapiens
acttggtaagwgagtaagtta

SEQ ID NO: 31273 - DNA, 21 bp, Homo sapiens
tgtgaggcctmtgttcacagc

SEQ ID NO: 31274 - DNA, 21 bp, Homo sapiens
tgactgaagaycagatgaaat

SEQ ID NO: 31275 - DNA, 21 bp, Homo sapiens
cacttcttctktgctctcatt

SEQ ID NO: 31276 - DNA, 21 bp, Homo sapiens
gatcaaacagygagcgacatc

SEQ ID NO: 31277 - DNA, 21 bp, Homo sapiens
gttaatgaaayagaatgctaa

SEQ ID NO: 31278 - DNA, 21 bp, Homo sapiens
tgtagcactgmagttaaggtt

SEQ ID NO: 31279 - DNA, 21 bp, Homo sapiens
ccgagtgtacrttataaaaat

SEQ ID NO: 31280 - DNA, 21 bp, Homo sapiens
tacagatgatstatggtagag

SEQ ID NO: 31281 - DNA, 21 bp, Homo sapiens
gtaggcttcgraatgtggaca

SEQ ID NO: 31282 - DNA, 21 bp, Homo sapiens
atatttattcytagatgatgc

SEQ ID NO: 31283 - DNA, 21 bp, Homo sapiens
ggccgttattstgaagccact

SEQ ID NO: 31284 - DNA, 21 bp, Homo sapiens
aagccatattkcagtcaggtc

SEQ ID NO: 31285 - DNA, 21 bp, Homo sapiens
tgtttagatgmaactgtaagt

SEQ ID NO: 31286 - DNA, 21 bp, Homo sapiens
caagtatttcrgtcactattt

SEQ ID NO: 31287 - DNA, 21 bp, Homo sapiens
tcacctaatcmgatgatacct

SEQ ID NO: 31288 - DNA, 21 bp, Homo sapiens
gatgcaaatawcttctggcac

SEQ ID NO: 31289 - DNA, 21 bp, Homo sapiens
tttgagctctrtaagttagct

SEQ ID NO: 31290 - DNA, 21 bp, Homo sapiens
gcaacttaaakaatttgcaca

SEQ ID NO: 31291 - DNA, 21 bp, Homo sapiens
tgagccagcastgtcacccca

SEQ ID NO: 31292 - DNA, 21 bp, Homo sapiens
gaaaccctatratgttctttg

SEQ ID NO: 31293 - DNA, 21 bp, Homo sapiens
tctgacctatracccctattc

SEQ ID NO: 31294 - DNA, 21 bp, Homo sapiens
tatgaatttgrttatgagaag

SEQ ID NO: 31295 - DNA, 21 bp, Homo sapiens
ggatgttacayctaatgactg

SEQ ID NO: 31296 - DNA, 21 bp, Homo sapiens
tgttgctctayagcattgtaa

SEQ ID NO: 31297 - DNA, 21 bp, Homo sapiens
tagtgggatasaaactatttt

SEQ ID NO: 31298 - DNA, 21 bp, Homo sapiens
caaaggctgartgcagtggct

SEQ ID NO: 31299 - DNA, 21 bp, Homo sapiens
cattttttgtygtttttccta

SEQ ID NO: 31300 - DNA, 21 bp, Homo sapiens
gtgtggaataycgtgacggtg

SEQ ID NO: 31301 - DNA, 21 bp, Homo sapiens
tctgcagacaygacaacatta

SEQ ID NO: 31302 - DNA, 21 bp, Homo sapiens
gatgcctcttkgtagaacttc

SEQ ID NO: 31303 - DNA, 21 bp, Homo sapiens
gtatggtttgkccttatagta

SEQ ID NO: 31304 - DNA, 21 bp, Homo sapiens
acataggttcrgagagtcatc

SEQ ID NO: 31305 - DNA, 21 bp, Homo sapiens
cctgaccaatstgtctttgac

SEQ ID NO: 31306 - DNA, 21 bp, Homo sapiens
gctcaaatagkggtggaatga

SEQ ID NO: 31307 - DNA, 21 bp, Homo sapiens
tcatcactgcygagagtagag

SEQ ID NO: 31308 - DNA, 21 bp, Homo sapiens
tggattcatgrtcacactctc

SEQ ID NO: 31309 - DNA, 21 bp, Homo sapiens
agctgcgtgcyggggacaact

SEQ ID NO: 31310 - DNA, 21 bp, Homo sapiens
agaattctgargcttaacagg

SEQ ID NO: 31311 - DNA, 21 bp, Homo sapiens
tgcagttaggraaaattgttc

SEQ ID NO: 31312 - DNA, 21 bp, Homo sapiens
tcatggtcacragctctgtta

SEQ ID NO: 31313 - DNA, 21 bp, Homo sapiens
acaagtaaccrtcatccccag

SEQ ID NO: 31314 - DNA, 21 bp, Homo sapiens
gctgggtgacrttgggcaagg

SEQ ID NO: 31315 - DNA, 21 bp, Homo sapiens
accctgagttsgaatcctgct

SEQ ID NO: 31316 - DNA, 21 bp, Homo sapiens
gactgaagaaytgccagatct

SEQ ID NO: 31317 - DNA, 21 bp, Homo sapiens
gtattctctayagagttagta

SEQ ID NO: 31318 - DNA, 21 bp, Homo sapiens
ggataatgtgyaaaatggatg

SEQ ID NO: 31319 - DNA, 21 bp, Homo sapiens
gactaaaatgyatcaactaca

SEQ ID NO: 31320 - DNA, 21 bp, Homo sapiens
ttcagtagtgyttcacatgca

SEQ ID NO: 31321 - DNA, 21 bp, Homo sapiens
accactttatygtttattctt

SEQ ID NO: 31322 - DNA, 21 bp, Homo sapiens
cattttaatamgaagagatca

SEQ ID NO: 31323 - DNA, 21 bp, Homo sapiens
acaaaaggccragtctctaaa

SEQ ID NO: 31324 - DNA, 21 bp, Homo sapiens
aagccataaaratgactagga

SEQ ID NO: 31325 - DNA, 21 bp, Homo sapiens
tcccactttcrgcagcgggag

SEQ ID NO: 31326 - DNA, 21 bp, Homo sapiens
tgacttattgygtagctattt

SEQ ID NO: 31327 - DNA, 21 bp, Homo sapiens
aaggtgaagamcaactccagt

SEQ ID NO: 31328 - DNA, 21 bp, Homo sapiens
gtaagttgtcsaaaattattc

SEQ ID NO: 31329 - DNA, 21 bp, Homo sapiens
gtatttcttawtgtagagact

SEQ ID NO: 31330 - DNA, 21 bp, Homo sapiens
acacaaatacrtgtggagatt

SEQ ID NO: 31331 - DNA, 21 bp, Homo sapiens
ctgtaaaatayaaaaggatct

SEQ ID NO: 31332 - DNA, 21 bp, Homo sapiens
ctaaatttcaygcagcatatg

SEQ ID NO: 31333 - DNA, 21 bp, Homo sapiens
aggaataaagscatcagagtg

SEQ ID NO: 31334 - DNA, 21 bp, Homo sapiens
gccactggtgmatggcccata

SEQ ID NO: 31335 - DNA, 21 bp, Homo sapiens
agtgtctgacrtatctaactt

SEQ ID NO: 31336 - DNA, 21 bp, Homo sapiens
gacccagagarattataaaag

SEQ ID NO: 31337 - DNA, 21 bp, Homo sapiens
taaaggacatmgctttgtttc

SEQ ID NO: 31338 - DNA, 21 bp, Homo sapiens
agacagagacrttgatttaac

SEQ ID NO: 31339 - DNA, 21 bp, Homo sapiens
ttgctaaactscctaacaata

SEQ ID NO: 31340 - DNA, 21 bp, Homo sapiens
tggaattatgkttagtaatcc

SEQ ID NO: 31341 - DNA, 21 bp, Homo sapiens
ttattacaaascttgcccatt

SEQ ID NO: 31342 - DNA, 21 bp, Homo sapiens
tctcagaatcrggatcacagt

SEQ ID NO: 31343 - DNA, 21 bp, Homo sapiens
acttggccatmtgatgaacaa

SEQ ID NO: 31344 - DNA, 21 bp, Homo sapiens
cagtgatgagygtggtcaggt

SEQ ID NO: 31345 - DNA, 21 bp, Homo sapiens
acggtgcacgytaattcccag

SEQ ID NO: 31346 - DNA, 21 bp, Homo sapiens
cggcatgtcayagtaaccagt

SEQ ID NO: 31347 - DNA, 21 bp, Homo sapiens
agaccagcaartggagattag

SEQ ID NO: 31348 - DNA, 21 bp, Homo sapiens
tgaatttagarggacagttga

SEQ ID NO: 31349 - DNA, 21 bp, Homo sapiens
cacccatggamagcaccctgt

SEQ ID NO: 31350 - DNA, 21 bp, Homo sapiens
aaattgagggmggcagggatt

SEQ ID NO: 31351 - DNA, 21 bp, Homo sapiens
ggaggggacaygaaagagagt

SEQ ID NO: 31352 - DNA, 21 bp, Homo sapiens
tattctcaggygccgtgttag

SEQ ID NO: 31353 - DNA, 21 bp, Homo sapiens
agctcagtagyacgaatcccc

SEQ ID NO: 31354 - DNA, 21 bp, Homo sapiens
ccatgtgtatsgtgggaatcc

SEQ ID NO: 31355 - DNA, 21 bp, Homo sapiens
agctccttggycacttctgtc

SEQ ID NO: 31356 - DNA, 21 bp, Homo sapiens
gacacctggcrattagcccca

SEQ ID NO: 31357 - DNA, 21 bp, Homo sapiens
tacatcaatgrgaagcattaa

SEQ ID NO: 31358 - DNA, 21 bp, Homo sapiens
tacactgacayagtaaaattc

SEQ ID NO: 31359 - DNA, 21 bp, Homo sapiens
accttgttgcrgtttgtggtg

SEQ ID NO: 31360 - DNA, 21 bp, Homo sapiens
gtatttttagyaaggtttcgc

SEQ ID NO: 31361 - DNA, 21 bp, Homo sapiens
cttggcactayccctgggcct

SEQ ID NO: 31362 - DNA, 21 bp, Homo sapiens
attcatgactkctccccaacc

SEQ ID NO: 31363 - DNA, 21 bp, Homo sapiens
ccgccgctccrccatcattta

SEQ ID NO: 31364 - DNA, 21 bp, Homo sapiens
gacaagtcacrtgtttcgcac

SEQ ID NO: 31365 - DNA, 21 bp, Homo sapiens
catcgacatawttcctttgtc

SEQ ID NO: 31366 - DNA, 21 bp, Homo sapiens
aagtattacaygggcactagt

SEQ ID NO: 31367 - DNA, 21 bp, Homo sapiens
ttggcctcaaygagctcccaa

SEQ ID NO: 31368 - DNA, 21 bp, Homo sapiens
gacacaaacarcgttaccgaa

SEQ ID NO: 31369 - DNA, 21 bp, Homo sapiens
tgtccacattrttatcatctc

SEQ ID NO: 31370 - DNA, 21 bp, Homo sapiens
ctagaaatttrgcgtgtcaaa

SEQ ID NO: 31371 - DNA, 21 bp, Homo sapiens
catccacccaygtcccagctg

SEQ ID NO: 31372 - DNA, 21 bp, Homo sapiens
ccaggtctctyccgctatact

SEQ ID NO: 31373 - DNA, 21 bp, Homo sapiens
gttcttgagtrtccgagtagt

SEQ ID NO: 31374 - DNA, 21 bp, Homo sapiens
acatctccatygctgagtcag

SEQ ID NO: 31375 - DNA, 21 bp, Homo sapiens
tttcctggttygtggcaccac

SEQ ID NO: 31376 - DNA, 21 bp, Homo sapiens
agaaaaagttrattatataag

SEQ ID NO: 31377 - DNA, 21 bp, Homo sapiens
ctggcctttcwgtaatgaaaa

SEQ ID NO: 31378 - DNA, 21 bp, Homo sapiens
tttatccctgmagacagacct

SEQ ID NO: 31379 - DNA, 21 bp, Homo sapiens
tcatgagcttrattcttttta

SEQ ID NO: 31380 - DNA, 21 bp, Homo sapiens
ctatctttcamagagcaagat

SEQ ID NO: 31381 - DNA, 21 bp, Homo sapiens
gtgtctccaamcaaagagagg

SEQ ID NO: 31382 - DNA, 21 bp, Homo sapiens
tctagggactktctaaggata

SEQ ID NO: 31383 - DNA, 21 bp, Homo sapiens
aacagtgcagytcgccaaaag

SEQ ID NO: 31384 - DNA, 21 bp, Homo sapiens
gtccacaagtrttcgctaagt

SEQ ID NO: 31385 - DNA, 21 bp, Homo sapiens
tcacttctgcmaacaagatgc

SEQ ID NO: 31386 - DNA, 21 bp, Homo sapiens
ggtagaaatcrtgctttgggt

SEQ ID NO: 31387 - DNA, 21 bp, Homo sapiens
atgtatatttsatgacatctt

SEQ ID NO: 31388 - DNA, 21 bp, Homo sapiens
gagctgaggcraaaagcaaat

SEQ ID NO: 31389 - DNA, 21 bp, Homo sapiens
agcactactcygtggaacact

SEQ ID NO: 31390 - DNA, 21 bp, Homo sapiens
ctattctgccyctgtaaattt

SEQ ID NO: 31391 - DNA, 21 bp, Homo sapiens
ttgacatataygcttggaata

SEQ ID NO: 31392 - DNA, 21 bp, Homo sapiens
ggttctgcctyactgtctgat

SEQ ID NO: 31393 - DNA, 21 bp, Homo sapiens
gaaaaacaagratcttttaac

SEQ ID NO: 31394 - DNA, 21 bp, Homo sapiens
aatatggtaaytatgaatggc

SEQ ID NO: 31395 - DNA, 21 bp, Homo sapiens
gttagattatrtggtgatgtc

SEQ ID NO: 31396 - DNA, 21 bp, Homo sapiens
ttgagacccckgtagtggacc

SEQ ID NO: 31397 - DNA, 21 bp, Homo sapiens
ccaggcccttratactcaaaa

SEQ ID NO: 31398 - DNA, 21 bp, Homo sapiens
aaatgttgtawctcctagtac

SEQ ID NO: 31399 - DNA, 21 bp, Homo sapiens
ctgtgaggctsctgcggaaat

SEQ ID NO: 31400 - DNA, 21 bp, Homo sapiens
gcctggtgtgyttataaaaat

SEQ ID NO: 31401 - DNA, 21 bp, Homo sapiens
gcgaagccatyaggtcccagg

SEQ ID NO: 31402 - DNA, 21 bp, Homo sapiens
ttttgctaaaygaaatggagc

SEQ ID NO: 31403 - DNA, 21 bp, Homo sapiens
attaattctaytatgctggac

SEQ ID NO: 31404 - DNA, 21 bp, Homo sapiens
atatttcctgytctctaacaa

SEQ ID NO: 31405 - DNA, 21 bp, Homo sapiens
gtgctggtgamtaggccaagg

SEQ ID NO: 31406 - DNA, 21 bp, Homo sapiens
ccaataacacrtaagtaatac

SEQ ID NO: 31407 - DNA, 21 bp, Homo sapiens
agccagtagtmataaagaatc

SEQ ID NO: 31408 - DNA, 21 bp, Homo sapiens
tggacatacaytgtgagtcag

SEQ ID NO: 31409 - DNA, 21 bp, Homo sapiens
tgatgttagargtccctggca

SEQ ID NO: 31410 - DNA, 21 bp, Homo sapiens
tctcaactttycctctacttt

SEQ ID NO: 31411 - DNA, 21 bp, Homo sapiens
aaaagttgtayctcaaggtgg

SEQ ID NO: 31412 - DNA, 21 bp, Homo sapiens
tctgtccatgytacaccatca

SEQ ID NO: 31413 - DNA, 21 bp, Homo sapiens
tcatttttcaygtttagcaga

SEQ ID NO: 31414 - DNA, 21 bp, Homo sapiens
ggcttggcagytcatgcctct

SEQ ID NO: 31415 - DNA, 21 bp, Homo sapiens
aaacttgatamattgtccatg

SEQ ID NO: 31416 - DNA, 21 bp, Homo sapiens
caggaaaggartacagaaatg

SEQ ID NO: 31417 - DNA, 21 bp, Homo sapiens
atattgccagmgctcaaatcc

SEQ ID NO: 31418 - DNA, 21 bp, Homo sapiens
tattttaatgygataggtaac

SEQ ID NO: 31419 - DNA, 21 bp, Homo sapiens
attagctcctyggtatcttaa

SEQ ID NO: 31420 - DNA, 21 bp, Homo sapiens
ctccatgaagyttttaaatac

SEQ ID NO: 31421 - DNA, 21 bp, Homo sapiens
accaccaacartattataagt

SEQ ID NO: 31422 - DNA, 21 bp, Homo sapiens
gtgacaaaatytgcacttgag

SEQ ID NO: 31423 - DNA, 21 bp, Homo sapiens
gtgagttttayagtatgttgg

SEQ ID NO: 31424 - DNA, 21 bp, Homo sapiens
tttatcagctrccaccctatc

SEQ ID NO: 31425 - DNA, 21 bp, Homo sapiens
cccgccccaarcatgctgaac

SEQ ID NO: 31426 - DNA, 21 bp, Homo sapiens
gtatttccttrcatcattatt

SEQ ID NO: 31427 - DNA, 21 bp, Homo sapiens
cactaatagtyttttacaact

SEQ ID NO: 31428 - DNA, 21 bp, Homo sapiens
ctctaaaggcmgaacacgttt

SEQ ID NO: 31429 - DNA, 21 bp, Homo sapiens
ttcaaaatacrtaagtcaaca

SEQ ID NO: 31430 - DNA, 21 bp, Homo sapiens
gaggataagtyccattgaagt

SEQ ID NO: 31431 - DNA, 21 bp, Homo sapiens
caaggcatgakcatgaaatgc

SEQ ID NO: 31432 - DNA, 21 bp, Homo sapiens
aaatcattaawcaaataaggt

SEQ ID NO: 31433 - DNA, 21 bp, Homo sapiens
ccttatttggmaacagagtca

SEQ ID NO: 31434 - DNA, 21 bp, Homo sapiens
ttatcagccayagggctcggg

SEQ ID NO: 31435 - DNA, 21 bp, Homo sapiens
ttcactcctayggccaccctt

SEQ ID NO: 31436 - DNA, 21 bp, Homo sapiens
ggcaccaggcrgcctcagaat

SEQ ID NO: 31437 - DNA, 21 bp, Homo sapiens
ccgtaacgccrtcaacgctgg

SEQ ID NO: 31438 - DNA, 21 bp, Homo sapiens
agttggtatgmaaagctgtgc

SEQ ID NO: 31439 - DNA, 21 bp, Homo sapiens
gcagggataayagaatagtga

SEQ ID NO: 31440 - DNA, 21 bp, Homo sapiens
tgtcatggcasaaggctccat

SEQ ID NO: 31441 - DNA, 21 bp, Homo sapiens
tcttgggaggmtgcagttatg

SEQ ID NO: 31442 - DNA, 21 bp, Homo sapiens
tctcacagatktggaagagta

SEQ ID NO: 31443 - DNA, 21 bp, Homo sapiens
accctgtgctrgaaaagtaac

SEQ ID NO: 31444 - DNA, 21 bp, Homo sapiens
cagggaggagraagctgggtg

SEQ ID NO: 31445 - DNA, 21 bp, Homo sapiens
cacttaatggwgtaatacaaa

SEQ ID NO: 31446 - DNA, 21 bp, Homo sapiens
ttcgcctgaaraaaaataaaa

SEQ ID NO: 31447 - DNA, 21 bp, Homo sapiens
ggcccacagcrtaacctaggt

SEQ ID NO: 31448 - DNA, 21 bp, Homo sapiens
gacactttcayagatttcttg

SEQ ID NO: 31449 - DNA, 21 bp, Homo sapiens
ttaaaacactktctacttttt

SEQ ID NO: 31450 - DNA, 21 bp, Homo sapiens
aattattttckgttctgaagt

SEQ ID NO: 31451 - DNA, 21 bp, Homo sapiens
ttacggttcgygatcaatcgg

SEQ ID NO: 31452 - DNA, 21 bp, Homo sapiens
tcacccactgrccaggtgcta

SEQ ID NO: 31453 - DNA, 21 bp, Homo sapiens
atagatagatrgatgttgcag

SEQ ID NO: 31454 - DNA, 21 bp, Homo sapiens
gttccctttcrcccaccccaa

SEQ ID NO: 31455 - DNA, 21 bp, Homo sapiens
ccaaagaccgrggacactctt

SEQ ID NO: 31456 - DNA, 21 bp, Homo sapiens
agacatgcaaycatcttagac

SEQ ID NO: 31457 - DNA, 21 bp, Homo sapiens
tttttccacgraacatcttac

SEQ ID NO: 31458 - DNA, 21 bp, Homo sapiens
aaatggggatyatgcatcatc

SEQ ID NO: 31459 - DNA, 21 bp, Homo sapiens
gtatgatggcmtttttatcca

SEQ ID NO: 31460 - DNA, 21 bp, Homo sapiens
caataaagccmctgaggacag

SEQ ID NO: 31461 - DNA, 21 bp, Homo sapiens
ccttggaatgycctaatcgcc

SEQ ID NO: 31462 - DNA, 21 bp, Homo sapiens
aacatgaaagrgaaaacgaaa

SEQ ID NO: 31463 - DNA, 21 bp, Homo sapiens
cctctagctgyagggtaagtc

SEQ ID NO: 31464 - DNA, 21 bp, Homo sapiens
tgaaatggcargagtctcctt

SEQ ID NO: 31465 - DNA, 21 bp, Homo sapiens
ggggccacggwtgaatggaaa

SEQ ID NO: 31466 - DNA, 21 bp, Homo sapiens
aaattataaaygctcaaaagc

SEQ ID NO: 31467 - DNA, 21 bp, Homo sapiens
cctaccaaaayggtatgtaaa

SEQ ID NO: 31468 - DNA, 21 bp, Homo sapiens
ctttctttaaygtaaaatgtg

SEQ ID NO: 31469 - DNA, 21 bp, Homo sapiens
aatggatttgytgatcataga

SEQ ID NO: 31470 - DNA, 21 bp, Homo sapiens
gttgttaacaygtcagttcta

SEQ ID NO: 31471 - DNA, 21 bp, Homo sapiens
cctaacagcaycccatacaga

SEQ ID NO: 31472 - DNA, 21 bp, Homo sapiens
cattctacttytgaaagattt

SEQ ID NO: 31473 - DNA, 21 bp, Homo sapiens
cttctcatccwtcagtccaca

SEQ ID NO: 31474 - DNA, 21 bp, Homo sapiens
ggcatatcatrgagtgtgttt

SEQ ID NO: 31475 - DNA, 21 bp, Homo sapiens
ctgtcatcctrctcaacattt

SEQ ID NO: 31476 - DNA, 21 bp, Homo sapiens
cactaacattsaagtcttaag

SEQ ID NO: 31477 - DNA, 21 bp, Homo sapiens
ccctttttccrtaggtctttt

SEQ ID NO: 31478 - DNA, 21 bp, Homo sapiens
aaggaaaatgrcatgcaatgg

SEQ ID NO: 31479 - DNA, 21 bp, Homo sapiens
ggctcctttarctttgcatca

SEQ ID NO: 31480 - DNA, 21 bp, Homo sapiens
aagctagtgcrttaaaccaaa

SEQ ID NO: 31481 - DNA, 21 bp, Homo sapiens
cttggcttgcrgagtcttcac

SEQ ID NO: 31482 - DNA, 21 bp, Homo sapiens
aaaagaggaartacagttctc

SEQ ID NO: 31483 - DNA, 21 bp, Homo sapiens
gagcctgtgtyaggatgtcag

SEQ ID NO: 31484 - DNA, 21 bp, Homo sapiens
taatctgtatrgggtgcttag

SEQ ID NO: 31485 - DNA, 21 bp, Homo sapiens
atacaggactyctctgagtta

SEQ ID NO: 31486 - DNA, 21 bp, Homo sapiens
gagcaaaagaygtttataaga

SEQ ID NO: 31487 - DNA, 21 bp, Homo sapiens
agaacctcaaratctgaattc

SEQ ID NO: 31488 - DNA, 21 bp, Homo sapiens
agagataccawgccttataga

SEQ ID NO: 31489 - DNA, 21 bp, Homo sapiens
tacaatgtctraggtggtaca

SEQ ID NO: 31490 - DNA, 21 bp, Homo sapiens
atggcctgtcrtttactttaa

SEQ ID NO: 31491 - DNA, 21 bp, Homo sapiens
ggacatagtaragctcccact

SEQ ID NO: 31492 - DNA, 21 bp, Homo sapiens
tctttaagttytaacctagat

SEQ ID NO: 31493 - DNA, 21 bp, Homo sapiens
taagagattcrcagaggcaac

SEQ ID NO: 31494 - DNA, 21 bp, Homo sapiens
cagtctggaayatacatggga

SEQ ID NO: 31495 - DNA, 21 bp, Homo sapiens
ttcacgaaccyaatgaaacgt

SEQ ID NO: 31496 - DNA, 21 bp, Homo sapiens
gccaaagaaarcagactcaag

SEQ ID NO: 31497 - DNA, 21 bp, Homo sapiens
gtaactttaayttcaggacta

SEQ ID NO: 31498 - DNA, 21 bp, Homo sapiens
cctacatgaartgtaaaaccc

SEQ ID NO: 31499 - DNA, 21 bp, Homo sapiens
catcatgggargaaagtggag

SEQ ID NO: 31500 - DNA, 21 bp, Homo sapiens
ttcagattacrtattagacat

SEQ ID NO: 31501 - DNA, 21 bp, Homo sapiens
tgcatccaacrtggacatggt

SEQ ID NO: 31502 - DNA, 21 bp, Homo sapiens
aagcagagggyaaggaaggac

SEQ ID NO: 31503 - DNA, 21 bp, Homo sapiens
tgtattctacytcaatatgaa

SEQ ID NO: 31504 - DNA, 21 bp, Homo sapiens
taaaagtatcrgcagatgcat

SEQ ID NO: 31505 - DNA, 21 bp, Homo sapiens
atcacaagcartttttgctac

SEQ ID NO: 31506 - DNA, 21 bp, Homo sapiens
tcagaaactgyttgaactaat

SEQ ID NO: 31507 - DNA, 21 bp, Homo sapiens
ccattaacgcyttcttctcag

SEQ ID NO: 31508 - DNA, 21 bp, Homo sapiens
aaccaaggaaytcactgcatt

SEQ ID NO: 31509 - DNA, 21 bp, Homo sapiens
ttggatacacrgtactataaa

SEQ ID NO: 31510 - DNA, 21 bp, Homo sapiens
ctctatcttaycaatcatggt

SEQ ID NO: 31511 - DNA, 21 bp, Homo sapiens
aggccaactcrtcaaagatag

SEQ ID NO: 31512 - DNA, 21 bp, Homo sapiens
tgataagtaaytgaatgttgg

SEQ ID NO: 31513 - DNA, 21 bp, Homo sapiens
ttgtgaggtcwccccagccac

SEQ ID NO: 31514 - DNA, 21 bp, Homo sapiens
aatcatatccygaaagtcttt

SEQ ID NO: 31515 - DNA, 21 bp, Homo sapiens
atttctgttayggataaatga

SEQ ID NO: 31516 - DNA, 21 bp, Homo sapiens
tctatccgctrcaaaatccct

SEQ ID NO: 31517 - DNA, 21 bp, Homo sapiens
tgctatacaaygttgtacata

SEQ ID NO: 31518 - DNA, 21 bp, Homo sapiens
accttgcctcytagtgattac

SEQ ID NO: 31519 - DNA, 21 bp, Homo sapiens
aaggagtgctwttattacact

SEQ ID NO: 31520 - DNA, 21 bp, Homo sapiens
ctggcttttgrgtaaagagac

SEQ ID NO: 31521 - DNA, 21 bp, Homo sapiens
ctatcctaggyatcttgtgct

SEQ ID NO: 31522 - DNA, 21 bp, Homo sapiens
ttgtttttttrtgtgtgtttt

SEQ ID NO: 31523 - DNA, 21 bp, Homo sapiens
tgtgtagttckttgccatttg

SEQ ID NO: 31524 - DNA, 21 bp, Homo sapiens
aattaaaaggkgctgtacaca

SEQ ID NO: 31525 - DNA, 21 bp, Homo sapiens
cctgtccctgyttgttctatt

SEQ ID NO: 31526 - DNA, 21 bp, Homo sapiens
ctcttgccctsttggcctcct

SEQ ID NO: 31527 - DNA, 21 bp, Homo sapiens
aaatgtaatgmatcatgtcga

SEQ ID NO: 31528 - DNA, 21 bp, Homo sapiens
taagaaatccrtgtaaaccat

SEQ ID NO: 31529 - DNA, 21 bp, Homo sapiens
ctcccttgatratcataattc

SEQ ID NO: 31530 - DNA, 21 bp, Homo sapiens
tccaagctaaragccccatat

SEQ ID NO: 31531 - DNA, 21 bp, Homo sapiens
tccctggaagyaaactgccca

SEQ ID NO: 31532 - DNA, 21 bp, Homo sapiens
gacaactagcraccataaata

SEQ ID NO: 31533 - DNA, 21 bp, Homo sapiens
aaatccctacyaccctccact

SEQ ID NO: 31534 - DNA, 21 bp, Homo sapiens
ctttgcccctrgaagaggaaa

SEQ ID NO: 31535 - DNA, 21 bp, Homo sapiens
tagatgacttyaggagctgga

SEQ ID NO: 31536 - DNA, 21 bp, Homo sapiens
gctctcattgyggtattcatg

SEQ ID NO: 31537 - DNA, 21 bp, Homo sapiens
ataattttccrgacagactct

SEQ ID NO: 31538 - DNA, 21 bp, Homo sapiens
tttaattgtcrtcttcgtgga

SEQ ID NO: 31539 - DNA, 21 bp, Homo sapiens
atggcagagasggggatgaag

SEQ ID NO: 31540 - DNA, 21 bp, Homo sapiens
cagcaagcgaraatctccaga

SEQ ID NO: 31541 - DNA, 21 bp, Homo sapiens
ttaaaaagctsggaagaaaat

SEQ ID NO: 31542 - DNA, 21 bp, Homo sapiens
cttgttgaacraactaaatga

SEQ ID NO: 31543 - DNA, 21 bp, Homo sapiens
tgggaaaatayaccaacacag

SEQ ID NO: 31544 - DNA, 21 bp, Homo sapiens
agaaaccatcragtggaattg

SEQ ID NO: 31545 - DNA, 21 bp, Homo sapiens
tgaattttagkttggcaaaga

SEQ ID NO: 31546 - DNA, 21 bp, Homo sapiens
ggacatgctcrtctcttctct

SEQ ID NO: 31547 - DNA, 21 bp, Homo sapiens
caaatgacacrggtaacttga

SEQ ID NO: 31548 - DNA, 21 bp, Homo sapiens
ctggttttatytcccctcaca

SEQ ID NO: 31549 - DNA, 21 bp, Homo sapiens
aacattgtgcrtgtgtataaa

SEQ ID NO: 31550 - DNA, 21 bp, Homo sapiens
atgggcacttstattcttaaa

SEQ ID NO: 31551 - DNA, 21 bp, Homo sapiens
gaatgcatggrttttctttag

SEQ ID NO: 31552 - DNA, 21 bp, Homo sapiens
gaatactttaycctggttttg

SEQ ID NO: 31553 - DNA, 21 bp, Homo sapiens
agacccaaatyctaaagcaaa

SEQ ID NO: 31554 - DNA, 21 bp, Homo sapiens
atctaataacygtaaaactgt

SEQ ID NO: 31555 - DNA, 21 bp, Homo sapiens
gacagcattcwgacattatgg

SEQ ID NO: 31556 - DNA, 21 bp, Homo sapiens
aacattcgttkagtgcctaat

SEQ ID NO: 31557 - DNA, 21 bp, Homo sapiens
tatgtatattraggagccatg

SEQ ID NO: 31558 - DNA, 21 bp, Homo sapiens
cattccacaayctcaaaatta

SEQ ID NO: 31559 - DNA, 21 bp, Homo sapiens
tcatgcagctkatctttcact

SEQ ID NO: 31560 - DNA, 21 bp, Homo sapiens
ttgtttaacayttcagtgatg

SEQ ID NO: 31561 - DNA, 21 bp, Homo sapiens
agcgtggtggrtgagatctcc

SEQ ID NO: 31562 - DNA, 21 bp, Homo sapiens
tagtggctgaycccagaggat

SEQ ID NO: 31563 - DNA, 21 bp, Homo sapiens
atctgttgagrgtgactgtat

SEQ ID NO: 31564 - DNA, 21 bp, Homo sapiens
ccttagtcttycatagggttc

SEQ ID NO: 31565 - DNA, 21 bp, Homo sapiens
attctgccagkacatcaccta

SEQ ID NO: 31566 - DNA, 21 bp, Homo sapiens
gcagtcaggckcacctaaagg

SEQ ID NO: 31567 - DNA, 21 bp, Homo sapiens
tcccagctgtsataagggcta

SEQ ID NO: 31568 - DNA, 21 bp, Homo sapiens
cgctggctggrtctgcgtttg

SEQ ID NO: 31569 - DNA, 21 bp, Homo sapiens
accaacatttycaggttctat

SEQ ID NO: 31570 - DNA, 21 bp, Homo sapiens
aaagtgcagaygtgaaaaatc

SEQ ID NO: 31571 - DNA, 21 bp, Homo sapiens
ttttcagggcrttcttccaga

SEQ ID NO: 31572 - DNA, 21 bp, Homo sapiens
ttaactcaccygagatatgtt

SEQ ID NO: 31573 - DNA, 21 bp, Homo sapiens
caaatatgggytcaggaagtt

SEQ ID NO: 31574 - DNA, 21 bp, Homo sapiens
accttaaaacyaacagaattg

SEQ ID NO: 31575 - DNA, 21 bp, Homo sapiens
tgcttttactwacctactctc

SEQ ID NO: 31576 - DNA, 21 bp, Homo sapiens
ttcatattcaratgtatagtt

SEQ ID NO: 31577 - DNA, 21 bp, Homo sapiens
ccgttataacytactggaaca

SEQ ID NO: 31578 - DNA, 21 bp, Homo sapiens
ggtcctcacayattcagtcac

SEQ ID NO: 31579 - DNA, 21 bp, Homo sapiens
aaacctacaayggttcatgta

SEQ ID NO: 31580 - DNA, 21 bp, Homo sapiens
aatagaatccractgagggag

SEQ ID NO: 31581 - DNA, 21 bp, Homo sapiens
gccttgtaagygtaaagcatg

SEQ ID NO: 31582 - DNA, 21 bp, Homo sapiens
aggatggcgarcttattgcct

SEQ ID NO: 31583 - DNA, 21 bp, Homo sapiens
cacatctgtartcattcctta

SEQ ID NO: 31584 - DNA, 21 bp, Homo sapiens
tagagagatasgcaacagctt

SEQ ID NO: 31585 - DNA, 21 bp, Homo sapiens
gaaacacagcrggtctcagcc

SEQ ID NO: 31586 - DNA, 21 bp, Homo sapiens
ctaagaccacrccacccgata

SEQ ID NO: 31587 - DNA, 21 bp, Homo sapiens
tgatgcccacrgaaggagaca

SEQ ID NO: 31588 - DNA, 21 bp, Homo sapiens
ggatccaaggmaggttcaaca

SEQ ID NO: 31589 - DNA, 21 bp, Homo sapiens
caccacatcartgtttacggt

SEQ ID NO: 31590 - DNA, 21 bp, Homo sapiens
aaaagtgatamgaagatcaat

SEQ ID NO: 31591 - DNA, 21 bp, Homo sapiens
aagggacagcrtatatcaaaa

SEQ ID NO: 31592 - DNA, 21 bp, Homo sapiens
aagaactttckggcctttcaa

SEQ ID NO: 31593 - DNA, 21 bp, Homo sapiens
gggagataacrtattgttgta

SEQ ID NO: 31594 - DNA, 21 bp, Homo sapiens
tgatgttgggrcttctctagg

SEQ ID NO: 31595 - DNA, 21 bp, Homo sapiens
aatgaatggakgaataaatca

SEQ ID NO: 31596 - DNA, 21 bp, Homo sapiens
ttaaacttctycttatatgga

SEQ ID NO: 31597 - DNA, 21 bp, Homo sapiens
ctgtaaacttycttttttaat

SEQ ID NO: 31598 - DNA, 21 bp, Homo sapiens
tacccaccatyttcattttgc

SEQ ID NO: 31599 - DNA, 21 bp, Homo sapiens
agcaacaggarctcatatgtt

SEQ ID NO: 31600 - DNA, 21 bp, Homo sapiens
aactgactgtrtgtgttctaa

SEQ ID NO: 31601 - DNA, 21 bp, Homo sapiens
tgtctgctcartaagtattgc

SEQ ID NO: 31602 - DNA, 21 bp, Homo sapiens
acagatatgcraatgagatca

SEQ ID NO: 31603 - DNA, 21 bp, Homo sapiens
ttcagattgaygattagacag

SEQ ID NO: 31604 - DNA, 21 bp, Homo sapiens
ctcacaagggytttatcttct

SEQ ID NO: 31605 - DNA, 21 bp, Homo sapiens
catggttgagrctgaataaag

SEQ ID NO: 31606 - DNA, 21 bp, Homo sapiens
gaaagatatcytgctcttacc

SEQ ID NO: 31607 - DNA, 21 bp, Homo sapiens
gtttagagagygtatggagag

SEQ ID NO: 31608 - DNA, 21 bp, Homo sapiens
tatctgctcartcaagacaat

SEQ ID NO: 31609 - DNA, 21 bp, Homo sapiens
ctagtttatayagaaagtagg

SEQ ID NO: 31610 - DNA, 21 bp, Homo sapiens
gtagaccgtayttaaaaccat

SEQ ID NO: 31611 - DNA, 21 bp, Homo sapiens
tagtgaaaaayttcttaaaac

SEQ ID NO: 31612 - DNA, 21 bp, Homo sapiens
ggtctccagtracccatcttg

SEQ ID NO: 31613 - DNA, 21 bp, Homo sapiens
ctgggtcagcmaacctgatat

SEQ ID NO: 31614 - DNA, 21 bp, Homo sapiens
ccataggagcracattaagtg

SEQ ID NO: 31615 - DNA, 21 bp, Homo sapiens
aaaaaacaagyttgtcatagg

SEQ ID NO: 31616 - DNA, 21 bp, Homo sapiens
gttacccagcraggctagaag

SEQ ID NO: 31617 - DNA, 21 bp, Homo sapiens
tgaagactctytgctcctctg

SEQ ID NO: 31618 - DNA, 21 bp, Homo sapiens
ttccccttacyagttgtggcc

SEQ ID NO: 31619 - DNA, 21 bp, Homo sapiens
gtcaaaggccrcatgaaagca

SEQ ID NO: 31620 - DNA, 21 bp, Homo sapiens
tggaagccacrttaggatatt

SEQ ID NO: 31621 - DNA, 21 bp, Homo sapiens
atttcacaccrtagttatcat

SEQ ID NO: 31622 - DNA, 21 bp, Homo sapiens
tcagctcttgmattttgttca

SEQ ID NO: 31623 - DNA, 21 bp, Homo sapiens
cgagtgtgctratatgctagc

SEQ ID NO: 31624 - DNA, 21 bp, Homo sapiens
agaccattatwtgagtaggat

SEQ ID NO: 31625 - DNA, 21 bp, Homo sapiens
atgattggttkgtgtaagggg

SEQ ID NO: 31626 - DNA, 21 bp, Homo sapiens
atgttttacartacccttttg

SEQ ID NO: 31627 - DNA, 21 bp, Homo sapiens
caggttaccakttaactgatg

SEQ ID NO: 31628 - DNA, 21 bp, Homo sapiens
tcacttgccgyaaccaataag

SEQ ID NO: 31629 - DNA, 21 bp, Homo sapiens
gcacaaggtcrgcacaagagc

SEQ ID NO: 31630 - DNA, 21 bp, Homo sapiens
gaaatattgcrgtattagaaa

SEQ ID NO: 31631 - DNA, 21 bp, Homo sapiens
cttgacaactrttcaccctac

SEQ ID NO: 31632 - DNA, 21 bp, Homo sapiens
gaaaagtcttrtttctacctt

SEQ ID NO: 31633 - DNA, 21 bp, Homo sapiens
gataaaataayctcccttaag

SEQ ID NO: 31634 - DNA, 21 bp, Homo sapiens
aaaccactgarcttgttataa

SEQ ID NO: 31635 - DNA, 21 bp, Homo sapiens
aacaattcctrttttattttg

SEQ ID NO: 31636 - DNA, 21 bp, Homo sapiens
gaccctaaccyagcagcacta

SEQ ID NO: 31637 - DNA, 21 bp, Homo sapiens
ctcacagatgyattggcagga

SEQ ID NO: 31638 - DNA, 21 bp, Homo sapiens
tgaacactgtyttggagatgt

SEQ ID NO: 31639 - DNA, 21 bp, Homo sapiens
tgtaattccayggttttgagt

SEQ ID NO: 31640 - DNA, 21 bp, Homo sapiens
attggacggtraaagctgttc

SEQ ID NO: 31641 - DNA, 21 bp, Homo sapiens
ctgataattcyaagaggttac

SEQ ID NO: 31642 - DNA, 21 bp, Homo sapiens
gtttagatgaytggagaaacc

SEQ ID NO: 31643 - DNA, 21 bp, Homo sapiens
gccttaaaccraatactgaga

SEQ ID NO: 31644 - DNA, 21 bp, Homo sapiens
atgtggatgasctttttccac

SEQ ID NO: 31645 - DNA, 21 bp, Homo sapiens
gagagcggaaycctgaagtta

SEQ ID NO: 31646 - DNA, 21 bp, Homo sapiens
gtgagaccttsagaaagcttt

SEQ ID NO: 31647 - DNA, 21 bp, Homo sapiens
tgttggagttmatgaaacatg

SEQ ID NO: 31648 - DNA, 21 bp, Homo sapiens
gactcaaaccraaaagagtta

SEQ ID NO: 31649 - DNA, 21 bp, Homo sapiens
atatatgagtmgccagagttt

SEQ ID NO: 31650 - DNA, 21 bp, Homo sapiens
aggatttgatygtggaagcct

SEQ ID NO: 31651 - DNA, 21 bp, Homo sapiens
acttctgatgscccttccagc

SEQ ID NO: 31652 - DNA, 21 bp, Homo sapiens
gaaggaaatgrtcataacctc

SEQ ID NO: 31653 - DNA, 21 bp, Homo sapiens
ctggtaggaayagcattggaa

SEQ ID NO: 31654 - DNA, 21 bp, Homo sapiens
acctaaatacytttgtgaaaa

SEQ ID NO: 31655 - DNA, 21 bp, Homo sapiens
gcttcttcatytaggtactga

SEQ ID NO: 31656 - DNA, 21 bp, Homo sapiens
ttatatcttgytattctttgc

SEQ ID NO: 31657 - DNA, 21 bp, Homo sapiens
gagcttatttmtttatccaaa

SEQ ID NO: 31658 - DNA, 21 bp, Homo sapiens
tgtgaaattaraatagctctt

SEQ ID NO: 31659 - DNA, 21 bp, Homo sapiens
tttaaaacttkgatccatttg

SEQ ID NO: 31660 - DNA, 21 bp, Homo sapiens
ggacattcccyggccaagtgt

SEQ ID NO: 31661 - DNA, 21 bp, Homo sapiens
catttgctttycttgtagtta

SEQ ID NO: 31662 - DNA, 21 bp, Homo sapiens
catcaactaaygtatccatct

SEQ ID NO: 31663 - DNA, 21 bp, Homo sapiens
gcagattactsaagctggaaa

SEQ ID NO: 31664 - DNA, 21 bp, Homo sapiens
ctgataggggytgtgtttttc

SEQ ID NO: 31665 - DNA, 21 bp, Homo sapiens
ccaaataaagsaagaagaaac

SEQ ID NO: 31666 - DNA, 21 bp, Homo sapiens
ctgaatccagratgggatttt

SEQ ID NO: 31667 - DNA, 21 bp, Homo sapiens
agtaagaaaayagatcaacgc

SEQ ID NO: 31668 - DNA, 21 bp, Homo sapiens
gctttagcccrttgtgtattt

SEQ ID NO: 31669 - DNA, 21 bp, Homo sapiens
ctttgtggacytcaaattttg

SEQ ID NO: 31670 - DNA, 21 bp, Homo sapiens
aaatttagcartgaagctgga

SEQ ID NO: 31671 - DNA, 21 bp, Homo sapiens
atagactcgtmcagccctatt

SEQ ID NO: 31672 - DNA, 21 bp, Homo sapiens
aggtcattccracatttgcct

SEQ ID NO: 31673 - DNA, 21 bp, Homo sapiens
tgtgagtgctyggaaacatct

SEQ ID NO: 31674 - DNA, 21 bp, Homo sapiens
tgcaaagtacmtgtgaatatt

SEQ ID NO: 31675 - DNA, 21 bp, Homo sapiens
ttctagctcaygttgccttcc

SEQ ID NO: 31676 - DNA, 21 bp, Homo sapiens
tcaatttgtgscacttgaaga

SEQ ID NO: 31677 - DNA, 21 bp, Homo sapiens
gtttctattaygagagagatc

SEQ ID NO: 31678 - DNA, 21 bp, Homo sapiens
attcactataygctctgtgca

SEQ ID NO: 31679 - DNA, 21 bp, Homo sapiens
gtatgacaaasgaaagctgga

SEQ ID NO: 31680 - DNA, 21 bp, Homo sapiens
cagtcatgagstttttataat

SEQ ID NO: 31681 - DNA, 21 bp, Homo sapiens
aatttccattkgatgggagga

SEQ ID NO: 31682 - DNA, 21 bp, Homo sapiens
gagagagttamccttaatcta

SEQ ID NO: 31683 - DNA, 21 bp, Homo sapiens
actcaagctgragctcacatg

SEQ ID NO: 31684 - DNA, 21 bp, Homo sapiens
ctatctagctrcctagttgct

SEQ ID NO: 31685 - DNA, 21 bp, Homo sapiens
cattttattgytccatcagag

SEQ ID NO: 31686 - DNA, 21 bp, Homo sapiens
tgattacaacwcattcttcaa

SEQ ID NO: 31687 - DNA, 21 bp, Homo sapiens
tgtaaatcatrgctgacatat

SEQ ID NO: 31688 - DNA, 21 bp, Homo sapiens
agaaaatgtayattcatccag

SEQ ID NO: 31689 - DNA, 21 bp, Homo sapiens
tgaatagactrcttttgcata

SEQ ID NO: 31690 - DNA, 21 bp, Homo sapiens
aatttttgaawctggattttg

SEQ ID NO: 31691 - DNA, 21 bp, Homo sapiens
cttgcttctgmtatccaagct

SEQ ID NO: 31692 - DNA, 21 bp, Homo sapiens
ctcctaaactrgaatggaata

SEQ ID NO: 31693 - DNA, 21 bp, Homo sapiens
tctctgaaacsttgataagga

SEQ ID NO: 31694 - DNA, 21 bp, Homo sapiens
gccatccagtkgttttcttta

SEQ ID NO: 31695 - DNA, 21 bp, Homo sapiens
ttatacagctrcctttgtcag

SEQ ID NO: 31696 - DNA, 21 bp, Homo sapiens
ctcagaagcayctaggggaat

SEQ ID NO: 31697 - DNA, 21 bp, Homo sapiens
taaatcctgcyggaaaacgta

SEQ ID NO: 31698 - DNA, 21 bp, Homo sapiens
agcccaaaggsatcagtgggt

SEQ ID NO: 31699 - DNA, 21 bp, Homo sapiens
cttcctcacawgtgctgggcc

SEQ ID NO: 31700 - DNA, 21 bp, Homo sapiens
gatgcccctgwccactatctc

SEQ ID NO: 31701 - DNA, 21 bp, Homo sapiens
ctaggtggcayttctgcatgt

SEQ ID NO: 31702 - DNA, 21 bp, Homo sapiens
tggcaggggawatcatctggt

SEQ ID NO: 31703 - DNA, 21 bp, Homo sapiens
agaaagattcrgaggcccttg

SEQ ID NO: 31704 - DNA, 21 bp, Homo sapiens
tccagttccaygaataatgtc

SEQ ID NO: 31705 - DNA, 21 bp, Homo sapiens
caaaggctatrgagttcaaca

SEQ ID NO: 31706 - DNA, 21 bp, Homo sapiens
gtcacaacaaygatctacagt

SEQ ID NO: 31707 - DNA, 21 bp, Homo sapiens
aggtcctgctscaagcctgag

SEQ ID NO: 31708 - DNA, 21 bp, Homo sapiens
gcagtctgttygggtctcccc

SEQ ID NO: 31709 - DNA, 21 bp, Homo sapiens
cttgcttgctrttactaagac

SEQ ID NO: 31710 - DNA, 21 bp, Homo sapiens
ccttggaggayttgtagcact

SEQ ID NO: 31711 - DNA, 21 bp, Homo sapiens
agacccagatrtggcaactcg

SEQ ID NO: 31712 - DNA, 21 bp, Homo sapiens
cccagagtatrctgcagaagg

SEQ ID NO: 31713 - DNA, 21 bp, Homo sapiens
aaccatctctkttggcgtgga

SEQ ID NO: 31714 - DNA, 21 bp, Homo sapiens
gagtttttacrcagagaaaag

SEQ ID NO: 31715 - DNA, 21 bp, Homo sapiens
tttaccgtaayatgtagcctg

SEQ ID NO: 31716 - DNA, 21 bp, Homo sapiens
aagcaacaatkaaaacatatg

SEQ ID NO: 31717 - DNA, 21 bp, Homo sapiens
tagtgacaccrcagaatctta

SEQ ID NO: 31718 - DNA, 21 bp, Homo sapiens
tacacattctrtatcacagcc

SEQ ID NO: 31719 - DNA, 21 bp, Homo sapiens
taaaatgagayagaccttcaa

SEQ ID NO: 31720 - DNA, 21 bp, Homo sapiens
aggaaactagsagcagaatgg

SEQ ID NO: 31721 - DNA, 21 bp, Homo sapiens
ttcattcctcwatcaacattt

SEQ ID NO: 31722 - DNA, 21 bp, Homo sapiens
taagacattgycccaaatagt

SEQ ID NO: 31723 - DNA, 21 bp, Homo sapiens
ggtacacgggygtcctcagtt

SEQ ID NO: 31724 - DNA, 21 bp, Homo sapiens
tcctcagtgaygaatgtaggc

SEQ ID NO: 31725 - DNA, 21 bp, Homo sapiens
aagctgatccrggtgcccacc

SEQ ID NO: 31726 - DNA, 21 bp, Homo sapiens
aggaaactttygaaaagcagt

SEQ ID NO: 31727 - DNA, 21 bp, Homo sapiens
cgtcgccgccyactcctgcag

SEQ ID NO: 31728 - DNA, 21 bp, Homo sapiens
cggccaaagaytctgaaatgt

SEQ ID NO: 31729 - DNA, 21 bp, Homo sapiens
gcagctattcyactgaattgc

SEQ ID NO: 31730 - DNA, 21 bp, Homo sapiens
aaccatattgytcaagctcga

SEQ ID NO: 31731 - DNA, 21 bp, Homo sapiens
aaatacacacrtaagtctgat

SEQ ID NO: 31732 - DNA, 21 bp, Homo sapiens
ttgataaccaytgagtctctt

SEQ ID NO: 31733 - DNA, 21 bp, Homo sapiens
aatggaccccraagtcaatat

SEQ ID NO: 31734 - DNA, 21 bp, Homo sapiens
gtcatttctaytatctgatta

SEQ ID NO: 31735 - DNA, 21 bp, Homo sapiens
gtgtgctactytcacaggaag

SEQ ID NO: 31736 - DNA, 21 bp, Homo sapiens
ttggcttcccrgggtttccta

SEQ ID NO: 31737 - DNA, 21 bp, Homo sapiens
acggccttctycaatcagcag

SEQ ID NO: 31738 - DNA, 21 bp, Homo sapiens
tatcagcccckcttacactct

SEQ ID NO: 31739 - DNA, 21 bp, Homo sapiens
aacctgaaccwttgcctagtt

SEQ ID NO: 31740 - DNA, 21 bp, Homo sapiens
gatgtgtacaytatgatacaa

SEQ ID NO: 31741 - DNA, 21 bp, Homo sapiens
ttagaacaaartaccctgcct

SEQ ID NO: 31742 - DNA, 21 bp, Homo sapiens
tctgcaattgyggagtgaaaa

SEQ ID NO: 31743 - DNA, 21 bp, Homo sapiens
ttcctactccrcactgcctcg

SEQ ID NO: 31744 - DNA, 21 bp, Homo sapiens
tagcttcaggkaattcttttt

SEQ ID NO: 31745 - DNA, 21 bp, Homo sapiens
aaggcgctgtrcatggagtca

SEQ ID NO: 31746 - DNA, 21 bp, Homo sapiens
aggtatggccrggctgaggag

SEQ ID NO: 31747 - DNA, 21 bp, Homo sapiens
caaggaacgtrtgcagagaaa

SEQ ID NO: 31748 - DNA, 21 bp, Homo sapiens
ccacttgggawtggcaactag

SEQ ID NO: 31749 - DNA, 21 bp, Homo sapiens
gattcccccartggtagagga

SEQ ID NO: 31750 - DNA, 21 bp, Homo sapiens
acgatgccccwtcactccaag

SEQ ID NO: 31751 - DNA, 21 bp, Homo sapiens
ttacatcagtsgctcggtctc

SEQ ID NO: 31752 - DNA, 21 bp, Homo sapiens
acaaggcctgrtcatgtttcc

SEQ ID NO: 31753 - DNA, 21 bp, Homo sapiens
actctctcacrtttccaactt

SEQ ID NO: 31754 - DNA, 21 bp, Homo sapiens
tccacctttgwgccaggaaac

SEQ ID NO: 31755 - DNA, 21 bp, Homo sapiens
ctgaaactggrtctcctggtt

SEQ ID NO: 31756 - DNA, 21 bp, Homo sapiens
aacccttttgyttagcagaaa

SEQ ID NO: 31757 - DNA, 21 bp, Homo sapiens
gataccccttktgaagccaac

SEQ ID NO: 31758 - DNA, 21 bp, Homo sapiens
actcagttgargaccagagat

SEQ ID NO: 31759 - DNA, 21 bp, Homo sapiens
tgctgaatcgytgaagttcat

SEQ ID NO: 31760 - DNA, 21 bp, Homo sapiens
ggtttatttcrcttcatgtaa

SEQ ID NO: 31761 - DNA, 21 bp, Homo sapiens
aaaagtaaaasgagtctcctt

SEQ ID NO: 31762 - DNA, 21 bp, Homo sapiens
ttcaggagcaytgcaacacaa

SEQ ID NO: 31763 - DNA, 21 bp, Homo sapiens
cctgctgtgtrttactttgca

SEQ ID NO: 31764 - DNA, 21 bp, Homo sapiens
gccctaccacrtgtgcaggtt

SEQ ID NO: 31765 - DNA, 21 bp, Homo sapiens
agcttcctcartaggaaaggt

SEQ ID NO: 31766 - DNA, 21 bp, Homo sapiens
aagatccactrcttgcacaag

SEQ ID NO: 31767 - DNA, 21 bp, Homo sapiens
aaagacacttstgatttcact

SEQ ID NO: 31768 - DNA, 21 bp, Homo sapiens
atgaaagaggytttctgtgtc

SEQ ID NO: 31769 - DNA, 21 bp, Homo sapiens
gtaaatcttaycgtgggcttt

SEQ ID NO: 31770 - DNA, 21 bp, Homo sapiens
gtttgatgtcrtagattaatg

SEQ ID NO: 31771 - DNA, 21 bp, Homo sapiens
tggcgctagakgccacaaggc

SEQ ID NO: 31772 - DNA, 21 bp, Homo sapiens
gtgatgttgcraagaagctgg

SEQ ID NO: 31773 - DNA, 21 bp, Homo sapiens
tgagcaattasttggtaaggg

SEQ ID NO: 31774 - DNA, 21 bp, Homo sapiens
aattttccctsagactcttca

SEQ ID NO: 31775 - DNA, 21 bp, Homo sapiens
attagtcctcsgagaagcagc

SEQ ID NO: 31776 - DNA, 21 bp, Homo sapiens
ctttaagctcrttctccctaa

SEQ ID NO: 31777 - DNA, 21 bp, Homo sapiens
gaagcctagaragcctggtaa

SEQ ID NO: 31778 - DNA, 21 bp, Homo sapiens
gcaaattaaamttccgattta

SEQ ID NO: 31779 - DNA, 21 bp, Homo sapiens
accaaccactrtaccaatagt

SEQ ID NO: 31780 - DNA, 21 bp, Homo sapiens
tgtttacagaytggaaaaatt

SEQ ID NO: 31781 - DNA, 21 bp, Homo sapiens
tgtaaatggarcaaaagaact

SEQ ID NO: 31782 - DNA, 21 bp, Homo sapiens
cttaacttatrtatgataaag

SEQ ID NO: 31783 - DNA, 21 bp, Homo sapiens
tcacttcagargaatcagaag

SEQ ID NO: 31784 - DNA, 21 bp, Homo sapiens
taactttaatrtggtagaatt

SEQ ID NO: 31785 - DNA, 21 bp, Homo sapiens
aatgttttaaytcttatcttg

SEQ ID NO: 31786 - DNA, 21 bp, Homo sapiens
ctaccttatcytgcctgaaga

SEQ ID NO: 31787 - DNA, 21 bp, Homo sapiens
agttcccaatkagtgcaaatc

SEQ ID NO: 31788 - DNA, 21 bp, Homo sapiens
tagtgatgatktgagtcacat

SEQ ID NO: 31789 - DNA, 21 bp, Homo sapiens
gtagacactgwgtaccttctg

SEQ ID NO: 31790 - DNA, 21 bp, Homo sapiens
tgagtttgcawatgttaggaa

SEQ ID NO: 31791 - DNA, 21 bp, Homo sapiens
aagttgttctyatttcaacag

SEQ ID NO: 31792 - DNA, 21 bp, Homo sapiens
caaaacagccrgaggcatgaa

SEQ ID NO: 31793 - DNA, 21 bp, Homo sapiens
gctcttctctraatttagtta

SEQ ID NO: 31794 - DNA, 21 bp, Homo sapiens
tgtaacagtcrttgtatatca

SEQ ID NO: 31795 - DNA, 21 bp, Homo sapiens
atgaatttccytcgttccaac

SEQ ID NO: 31796 - DNA, 21 bp, Homo sapiens
ccagaagtaawaacctctgta

SEQ ID NO: 31797 - DNA, 21 bp, Homo sapiens
tatacaaagcrtcttcattca

SEQ ID NO: 31798 - DNA, 21 bp, Homo sapiens
tttctttttgyatttttcttt

SEQ ID NO: 31799 - DNA, 21 bp, Homo sapiens
catttttaatmttaaaacaac

SEQ ID NO: 31800 - DNA, 21 bp, Homo sapiens
acccatgcagsctgcagttct

SEQ ID NO: 31801 - DNA, 21 bp, Homo sapiens
ataatatacarctctcattct

SEQ ID NO: 31802 - DNA, 21 bp, Homo sapiens
agagatttccrtttgaaatgt

SEQ ID NO: 31803 - DNA, 21 bp, Homo sapiens
ttgtgggaagyccatgaaacg

SEQ ID NO: 31804 - DNA, 21 bp, Homo sapiens
catgctattawgtgaaacctt

SEQ ID NO: 31805 - DNA, 21 bp, Homo sapiens
ttttaaataartcctcgagaa

SEQ ID NO: 31806 - DNA, 21 bp, Homo sapiens
acataacctgrcagactggat

SEQ ID NO: 31807 - DNA, 21 bp, Homo sapiens
tgagagaaaaraagaactttt

SEQ ID NO: 31808 - DNA, 21 bp, Homo sapiens
ggtcaaaagtrtgataatgat

SEQ ID NO: 31809 - DNA, 21 bp, Homo sapiens
tatttttactkctttcaagga

SEQ ID NO: 31810 - DNA, 21 bp, Homo sapiens
ctgattcagartcatctgcct

SEQ ID NO: 31811 - DNA, 21 bp, Homo sapiens
tgttcttctgyataatcaaga

SEQ ID NO: 31812 - DNA, 21 bp, Homo sapiens
aggatcccttygccccacttt

SEQ ID NO: 31813 - DNA, 21 bp, Homo sapiens
cacttcattayatcccatgct

SEQ ID NO: 31814 - DNA, 21 bp, Homo sapiens
aattagatgtrtaggtagcag

SEQ ID NO: 31815 - DNA, 21 bp, Homo sapiens
gttgggtttakgaaaatgttt

SEQ ID NO: 31816 - DNA, 21 bp, Homo sapiens
tcaacatcttraccattttag

SEQ ID NO: 31817 - DNA, 21 bp, Homo sapiens
ataattggatkaagggcaaag

SEQ ID NO: 31818 - DNA, 21 bp, Homo sapiens
taacttctgawttaagtttgc

SEQ ID NO: 31819 - DNA, 21 bp, Homo sapiens
caccttcacayacgatcattc

SEQ ID NO: 31820 - DNA, 21 bp, Homo sapiens
aggagaaggckctcagagaca

SEQ ID NO: 31821 - DNA, 21 bp, Homo sapiens
aggagttgccraaactgtgaa

SEQ ID NO: 31822 - DNA, 21 bp, Homo sapiens
gtaaagaatarccagttgtca

SEQ ID NO: 31823 - DNA, 21 bp, Homo sapiens
taccaggaagmaagaagggct

SEQ ID NO: 31824 - DNA, 21 bp, Homo sapiens
atgatttagcrtagcttagct

SEQ ID NO: 31825 - DNA, 21 bp, Homo sapiens
ttatagttacyggtcccaagt

SEQ ID NO: 31826 - DNA, 21 bp, Homo sapiens
aaaaactgaakccttccaccc

SEQ ID NO: 31827 - DNA, 21 bp, Homo sapiens
ttggtggaagwatatgttact

SEQ ID NO: 31828 - DNA, 21 bp, Homo sapiens
tcagtgatacycataatttca

SEQ ID NO: 31829 - DNA, 21 bp, Homo sapiens
tatggtacatktttgctgtct

SEQ ID NO: 31830 - DNA, 21 bp, Homo sapiens
ttaggggtctyatttgcataa

SEQ ID NO: 31831 - DNA, 21 bp, Homo sapiens
tggttctatcrgtacactggc

SEQ ID NO: 31832 - DNA, 21 bp, Homo sapiens
ttccatcagckccaacaacat

SEQ ID NO: 31833 - DNA, 21 bp, Homo sapiens
cttggtgccaytgaattttta

SEQ ID NO: 31834 - DNA, 21 bp, Homo sapiens
accatttcctytggagtttct

SEQ ID NO: 31835 - DNA, 21 bp, Homo sapiens
catttttgtcwggtgacttaa

SEQ ID NO: 31836 - DNA, 21 bp, Homo sapiens
tgagcttttayagcctgtaat

SEQ ID NO: 31837 - DNA, 21 bp, Homo sapiens
tattgtcttaractggtattc

SEQ ID NO: 31838 - DNA, 21 bp, Homo sapiens
ttttgtgcttkcatccaactc

SEQ ID NO: 31839 - DNA, 21 bp, Homo sapiens
taattgtgttktaagctaaaa

SEQ ID NO: 31840 - DNA, 21 bp, Homo sapiens
tccagatggayaaaatcgcta

SEQ ID NO: 31841 - DNA, 21 bp, Homo sapiens
ttcatgcttcytgggcaataa

SEQ ID NO: 31842 - DNA, 21 bp, Homo sapiens
gctcatcgatrtctaaactct

SEQ ID NO: 31843 - DNA, 21 bp, Homo sapiens
tggattaagayacctagctgg

SEQ ID NO: 31844 - DNA, 21 bp, Homo sapiens
gctaaaatcaygtagtgggga

SEQ ID NO: 31845 - DNA, 21 bp, Homo sapiens
gtttaattgamtcttatcaat

SEQ ID NO: 31846 - DNA, 21 bp, Homo sapiens
aattaaaggtwaacaagccat

SEQ ID NO: 31847 - DNA, 21 bp, Homo sapiens
tgaagttccaygaaatataaa

SEQ ID NO: 31848 - DNA, 21 bp, Homo sapiens
tcttattggcrtttttgcttt

SEQ ID NO: 31849 - DNA, 21 bp, Homo sapiens
aagactgattktggcaaaact

SEQ ID NO: 31850 - DNA, 21 bp, Homo sapiens
aacagtgggcytaaaaaaact

SEQ ID NO: 31851 - DNA, 21 bp, Homo sapiens
gttatggccartttcattttg

SEQ ID NO: 31852 - DNA, 21 bp, Homo sapiens
ccagctgcccmccttttccca

SEQ ID NO: 31853 - DNA, 21 bp, Homo sapiens
taaatttgctkaaaagcccag

SEQ ID NO: 31854 - DNA, 21 bp, Homo sapiens
atcagtgaggsctttatgaag

SEQ ID NO: 31855 - DNA, 21 bp, Homo sapiens
tacttcttatrgcacttatca

SEQ ID NO: 31856 - DNA, 21 bp, Homo sapiens
gtcacatgctrcccctagtgg

SEQ ID NO: 31857 - DNA, 21 bp, Homo sapiens
attacactgtragacattgat

SEQ ID NO: 31858 - DNA, 21 bp, Homo sapiens
cttgcccctcrcttatcttct

SEQ ID NO: 31859 - DNA, 21 bp, Homo sapiens
ggctcaaatamcagcttcagt

SEQ ID NO: 31860 - DNA, 21 bp, Homo sapiens
ttctggggcaycagaaaaatc

SEQ ID NO: 31861 - DNA, 21 bp, Homo sapiens
gcacagggaaytggcttggaa

SEQ ID NO: 31862 - DNA, 21 bp, Homo sapiens
tgtgagtatakggaacagcag

SEQ ID NO: 31863 - DNA, 21 bp, Homo sapiens
tctgtgccctraagagtggcc

SEQ ID NO: 31864 - DNA, 21 bp, Homo sapiens
ttgtgatgagkaaagagagat

SEQ ID NO: 31865 - DNA, 21 bp, Homo sapiens
attcccttggycccaaatgcc

SEQ ID NO: 31866 - DNA, 21 bp, Homo sapiens
tcactaaagastccaaaataa

SEQ ID NO: 31867 - DNA, 21 bp, Homo sapiens
ttaaggtaacrtgaatgcaat

SEQ ID NO: 31868 - DNA, 21 bp, Homo sapiens
cgacaatgctrctttcaagtc

SEQ ID NO: 31869 - DNA, 21 bp, Homo sapiens
tgtgaattttytctggctgcc

SEQ ID NO: 31870 - DNA, 21 bp, Homo sapiens
atgtgggattkgattacaaag

SEQ ID NO: 31871 - DNA, 21 bp, Homo sapiens
ttggacttgargtgcctcctc

SEQ ID NO: 31872 - DNA, 21 bp, Homo sapiens
tccagcatttsacagagcaga

SEQ ID NO: 31873 - DNA, 21 bp, Homo sapiens
tttcctgtcawtgaatgcata

SEQ ID NO: 31874 - DNA, 21 bp, Homo sapiens
cagcagcaggyctagtttatg

SEQ ID NO: 31875 - DNA, 21 bp, Homo sapiens
tcagttttcawgtccacagaa

SEQ ID NO: 31876 - DNA, 21 bp, Homo sapiens
acaagaaacamtgtgtctaca

SEQ ID NO: 31877 - DNA, 21 bp, Homo sapiens
agccttgatgmctgttgctaa

SEQ ID NO: 31878 - DNA, 21 bp, Homo sapiens
tgatcacacckgcctatcaac

SEQ ID NO: 31879 - DNA, 21 bp, Homo sapiens
tcttcctttcmcccagtttag

SEQ ID NO: 31880 - DNA, 21 bp, Homo sapiens
tggactaatgyttgttggaat

SEQ ID NO: 31881 - DNA, 21 bp, Homo sapiens
agctgcagctrtgacaagccg

SEQ ID NO: 31882 - DNA, 21 bp, Homo sapiens
tctttggaatytcatctggct

SEQ ID NO: 31883 - DNA, 21 bp, Homo sapiens
cttctcaaacmaaatttgcat

SEQ ID NO: 31884 - DNA, 21 bp, Homo sapiens
aaggactgtamaatacaaaac

SEQ ID NO: 31885 - DNA, 21 bp, Homo sapiens
tcacttttgargcaatgggga

SEQ ID NO: 31886 - DNA, 21 bp, Homo sapiens
ttatcatatgwcctgagctgc

SEQ ID NO: 31887 - DNA, 21 bp, Homo sapiens
agttaaaaatyaaattgttgg

SEQ ID NO: 31888 - DNA, 21 bp, Homo sapiens
cagttacgaawgcatctggcc

SEQ ID NO: 31889 - DNA, 21 bp, Homo sapiens
tcaaggagatytcaaaggaga

SEQ ID NO: 31890 - DNA, 21 bp, Homo sapiens
aattaagaagragcaaagtta

SEQ ID NO: 31891 - DNA, 21 bp, Homo sapiens
gcatagccagkgatcaaagaa

SEQ ID NO: 31892 - DNA, 21 bp, Homo sapiens
ccatcctagtraaaagaataa

SEQ ID NO: 31893 - DNA, 21 bp, Homo sapiens
agagaaagtgkctcatttaaa

SEQ ID NO: 31894 - DNA, 21 bp, Homo sapiens
gtatgaagagmcctcattttg

SEQ ID NO: 31895 - DNA, 21 bp, Homo sapiens
tctggaagtgmgggcctctcg

SEQ ID NO: 31896 - DNA, 21 bp, Homo sapiens
atttttggagsaaatgagact

SEQ ID NO: 31897 - DNA, 21 bp, Homo sapiens
cagtatattarcaattctaag

SEQ ID NO: 31898 - DNA, 21 bp, Homo sapiens
cccgcaacctygggcaactta

SEQ ID NO: 31899 - DNA, 21 bp, Homo sapiens
tgtgtcctctytgactttata

SEQ ID NO: 31900 - DNA, 21 bp, Homo sapiens
atacccatgcmtatgaataaa

SEQ ID NO: 31901 - DNA, 21 bp, Homo sapiens
tccacaaattsaagaagtcct

SEQ ID NO: 31902 - DNA, 21 bp, Homo sapiens
ctacaacataycgaggtttcc

SEQ ID NO: 31903 - DNA, 21 bp, Homo sapiens
cctaaatctgycctttacagg

SEQ ID NO: 31904 - DNA, 21 bp, Homo sapiens
ccaatatggcrccaaagtcaa

SEQ ID NO: 31905 - DNA, 21 bp, Homo sapiens
tttcacgctgygtttcacact

SEQ ID NO: 31906 - DNA, 21 bp, Homo sapiens
tatagatgagyggactccaaa

SEQ ID NO: 31907 - DNA, 21 bp, Homo sapiens
cttccaaaaakgataacaaat

SEQ ID NO: 31908 - DNA, 21 bp, Homo sapiens
ctacagaaagsgacctgtgcg

SEQ ID NO: 31909 - DNA, 21 bp, Homo sapiens
cagcaggagawccctcgaaga

SEQ ID NO: 31910 - DNA, 21 bp, Homo sapiens
ggcatgtttgktcttttctct

SEQ ID NO: 31911 - DNA, 21 bp, Homo sapiens
atcaggaaatrgcactgacca

SEQ ID NO: 31912 - DNA, 21 bp, Homo sapiens
caagtaaattmctgctcattt

SEQ ID NO: 31913 - DNA, 21 bp, Homo sapiens
aaatggcaggragatggattc

SEQ ID NO: 31914 - DNA, 21 bp, Homo sapiens
taagaagataytatttttgat

SEQ ID NO: 31915 - DNA, 21 bp, Homo sapiens
aaagaaacaamagtgagcaac

SEQ ID NO: 31916 - DNA, 21 bp, Homo sapiens
cctattagccrtcattctcag

SEQ ID NO: 31917 - DNA, 21 bp, Homo sapiens
gatctgggcakgttggggact

SEQ ID NO: 31918 - DNA, 21 bp, Homo sapiens
attaggaaaaytggaacataa

SEQ ID NO: 31919 - DNA, 21 bp, Homo sapiens
tccatggtaartgacctctat

SEQ ID NO: 31920 - DNA, 21 bp, Homo sapiens
ccttaaaaagrgtttccactt

SEQ ID NO: 31921 - DNA, 21 bp, Homo sapiens
gaaagtatacwctcagtctga

SEQ ID NO: 31922 - DNA, 21 bp, Homo sapiens
ctaggatttcmccattaaatt

SEQ ID NO: 31923 - DNA, 21 bp, Homo sapiens
agagtgtatcmcctgctccct

SEQ ID NO: 31924 - DNA, 21 bp, Homo sapiens
aagcagctacrgtgtttccac

SEQ ID NO: 31925 - DNA, 21 bp, Homo sapiens
tgcagattctyattgtcttct

SEQ ID NO: 31926 - DNA, 21 bp, Homo sapiens
atgaatgagaygtaaaatcag

SEQ ID NO: 31927 - DNA, 21 bp, Homo sapiens
atcctgaacaycaaaggatta

SEQ ID NO: 31928 - DNA, 21 bp, Homo sapiens
tacactctacmcaaaggaaat

SEQ ID NO: 31929 - DNA, 21 bp, Homo sapiens
aggtgggttaygaaagtttaa

SEQ ID NO: 31930 - DNA, 21 bp, Homo sapiens
ttgatacacaygaattggaag

SEQ ID NO: 31931 - DNA, 21 bp, Homo sapiens
gatcaaggaamaaggttttat

SEQ ID NO: 31932 - DNA, 21 bp, Homo sapiens
aaggagaagaygattgccaaa

SEQ ID NO: 31933 - DNA, 21 bp, Homo sapiens
aggcttcacawtggatggaca

SEQ ID NO: 31934 - DNA, 21 bp, Homo sapiens
gatctagtagmtttttagact

SEQ ID NO: 31935 - DNA, 21 bp, Homo sapiens
cctggcctttrgtgttctgta

SEQ ID NO: 31936 - DNA, 21 bp, Homo sapiens
caggacttccragttttctcc

SEQ ID NO: 31937 - DNA, 21 bp, Homo sapiens
taagaaacagraagaaaaaaa

SEQ ID NO: 31938 - DNA, 21 bp, Homo sapiens
catctgtgacmtattaggata

SEQ ID NO: 31939 - DNA, 21 bp, Homo sapiens
gttaaacaccrcaggtactag

SEQ ID NO: 31940 - DNA, 21 bp, Homo sapiens
ttgtataaaamtaggatcaac

SEQ ID NO: 31941 - DNA, 21 bp, Homo sapiens
cacagagttawatataaagag

SEQ ID NO: 31942 - DNA, 21 bp, Homo sapiens
cagtgaggatwtttgcagaca

SEQ ID NO: 31943 - DNA, 21 bp, Homo sapiens
tgacttgagayactagtttga

SEQ ID NO: 31944 - DNA, 21 bp, Homo sapiens
ttgagatttaygcttactttt

SEQ ID NO: 31945 - DNA, 21 bp, Homo sapiens
aacaattggartacctgacag

SEQ ID NO: 31946 - DNA, 21 bp, Homo sapiens
ccagaaagagratttgctgtt

SEQ ID NO: 31947 - DNA, 21 bp, Homo sapiens
tctactttaargcccctcatt

SEQ ID NO: 31948 - DNA, 21 bp, Homo sapiens
ttcagaatggmgcaacaaaag

SEQ ID NO: 31949 - DNA, 21 bp, Homo sapiens
ctgttgtagtwtgattcaaat

SEQ ID NO: 31950 - DNA, 21 bp, Homo sapiens
cacaataacgytgaaaaccaa

SEQ ID NO: 31951 - DNA, 21 bp, Homo sapiens
aatcaggttamataagtagta

SEQ ID NO: 31952 - DNA, 21 bp, Homo sapiens
tgtgagccccrttaacaacag

SEQ ID NO: 31953 - DNA, 21 bp, Homo sapiens
cccattaaaayatcatcctat

SEQ ID NO: 31954 - DNA, 21 bp, Homo sapiens
tttataaatgrgttctgagag

SEQ ID NO: 31955 - DNA, 21 bp, Homo sapiens
acctaagaagwtagtggaaaa

SEQ ID NO: 31956 - DNA, 21 bp, Homo sapiens
ttttctgttgytcattcagca

SEQ ID NO: 31957 - DNA, 21 bp, Homo sapiens
ttaacaagctrgatgaagtga

SEQ ID NO: 31958 - DNA, 21 bp, Homo sapiens
aacaaacatasaaagtaaata

SEQ ID NO: 31959 - DNA, 21 bp, Homo sapiens
ttgcttttatscaatatcagt

SEQ ID NO: 31960 - DNA, 21 bp, Homo sapiens
aaaaatatggrctgaaaatgt

SEQ ID NO: 31961 - DNA, 21 bp, Homo sapiens
ttttgatatcytaattatgcc

SEQ ID NO: 31962 - DNA, 21 bp, Homo sapiens
agaagaagtgyatttttgctt

SEQ ID NO: 31963 - DNA, 21 bp, Homo sapiens
ccctcgccttyattgataaat

SEQ ID NO: 31964 - DNA, 21 bp, Homo sapiens
tttcatgggtrtgtaaatagg

SEQ ID NO: 31965 - DNA, 21 bp, Homo sapiens
taccagctgaytgggctttgt

SEQ ID NO: 31966 - DNA, 21 bp, Homo sapiens
gtagcaacacytagatatgga

SEQ ID NO: 31967 - DNA, 21 bp, Homo sapiens
aagactcttaraggctgggtg

SEQ ID NO: 31968 - DNA, 21 bp, Homo sapiens
ttatctcatcrtaagttatca

SEQ ID NO: 31969 - DNA, 21 bp, Homo sapiens
gtcctccaagytgcatacccc

SEQ ID NO: 31970 - DNA, 21 bp, Homo sapiens
ctgatttctastctggttgat

SEQ ID NO: 31971 - DNA, 21 bp, Homo sapiens
gagacttcagyggagaaccgt

SEQ ID NO: 31972 - DNA, 21 bp, Homo sapiens
acttgtgttcmcttctctact

SEQ ID NO: 31973 - DNA, 21 bp, Homo sapiens
gacgttaaacytctggttaag

SEQ ID NO: 31974 - DNA, 21 bp, Homo sapiens
ttactcaatayagattcaagc

SEQ ID NO: 31975 - DNA, 21 bp, Homo sapiens
ctcagcggcartatctactta

SEQ ID NO: 31976 - DNA, 21 bp, Homo sapiens
tggttcattartactgtgata

SEQ ID NO: 31977 - DNA, 21 bp, Homo sapiens
atgagttatgrtcgtgctact

SEQ ID NO: 31978 - DNA, 21 bp, Homo sapiens
tagaaagatgytatcactaat

SEQ ID NO: 31979 - DNA, 21 bp, Homo sapiens
gtcagattacraaacccagct

SEQ ID NO: 31980 - DNA, 21 bp, Homo sapiens
tccaaaatccstgggagattt

SEQ ID NO: 31981 - DNA, 21 bp, Homo sapiens
cccactaaaaygaactgaaag

SEQ ID NO: 31982 - DNA, 21 bp, Homo sapiens
gtgacaagtgytttcttttat

SEQ ID NO: 31983 - DNA, 21 bp, Homo sapiens
gaatttacttktaacttagtg

SEQ ID NO: 31984 - DNA, 21 bp, Homo sapiens
gaagcaatgarcaatacagaa

SEQ ID NO: 31985 - DNA, 21 bp, Homo sapiens
tcacctcataraaaaccttgg

SEQ ID NO: 31986 - DNA, 21 bp, Homo sapiens
tctctcacatmaatcttggag

SEQ ID NO: 31987 - DNA, 21 bp, Homo sapiens
tacaaaaattmagtaatatac

SEQ ID NO: 31988 - DNA, 21 bp, Homo sapiens
ccagtatttgyctttctgaat

SEQ ID NO: 31989 - DNA, 21 bp, Homo sapiens
gatgttttaakaataacaggg

SEQ ID NO: 31990 - DNA, 21 bp, Homo sapiens
ataaggatttwaaaaatattt

SEQ ID NO: 31991 - DNA, 21 bp, Homo sapiens
attcaactatktgtttagtga

SEQ ID NO: 31992 - DNA, 21 bp, Homo sapiens
tttgccctatratcttggctt

SEQ ID NO: 31993 - DNA, 21 bp, Homo sapiens
acttcttctgmaaagtctata

SEQ ID NO: 31994 - DNA, 21 bp, Homo sapiens
atagagcgagsaagaaatgta

SEQ ID NO: 31995 - DNA, 21 bp, Homo sapiens
gccagcaactrtaagtgccac

SEQ ID NO: 31996 - DNA, 21 bp, Homo sapiens
aaatttgctgygtaatgtgta

SEQ ID NO: 31997 - DNA, 21 bp, Homo sapiens
gcaccatggcrcttaactgta

SEQ ID NO: 31998 - DNA, 21 bp, Homo sapiens
caaagctccawgggagaatac

SEQ ID NO: 31999 - DNA, 21 bp, Homo sapiens
gaaaacaacakatggtttgaa

SEQ ID NO: 32000 - DNA, 21 bp, Homo sapiens
gcctagcaggrcaccatacaa

SEQ ID NO: 32001 - DNA, 21 bp, Homo sapiens
ggcaccattgrtctctgttac

SEQ ID NO: 32002 - DNA, 21 bp, Homo sapiens
tgattcctgtrtctttataaa

SEQ ID NO: 32003 - DNA, 21 bp, Homo sapiens
gtattaccttytagtgaacta

SEQ ID NO: 32004 - DNA, 21 bp, Homo sapiens
ccatataactrgattagtcat

SEQ ID NO: 32005 - DNA, 21 bp, Homo sapiens
attgaaatgayttttggctac

SEQ ID NO: 32006 - DNA, 21 bp, Homo sapiens
atataatcttyctagatatgg

SEQ ID NO: 32007 - DNA, 21 bp, Homo sapiens
tctgatcaacrtaaaattagg

SEQ ID NO: 32008 - DNA, 21 bp, Homo sapiens
tgggaaaagawgctatgaaat

SEQ ID NO: 32009 - DNA, 21 bp, Homo sapiens
atttgttaatyccttgctcat

SEQ ID NO: 32010 - DNA, 21 bp, Homo sapiens
ttaaaaaaaakaagttatcat

SEQ ID NO: 32011 - DNA, 21 bp, Homo sapiens
tgctgtgaatrttctatgagc

SEQ ID NO: 32012 - DNA, 21 bp, Homo sapiens
attaaatttgytattactgct

SEQ ID NO: 32013 - DNA, 21 bp, Homo sapiens
aagctacactytctagcaact

SEQ ID NO: 32014 - DNA, 21 bp, Homo sapiens
cctggattaaytcaatctcca

SEQ ID NO: 32015 - DNA, 21 bp, Homo sapiens
attttccaatrggactgggta

SEQ ID NO: 32016 - DNA, 21 bp, Homo sapiens
atatcctggaygctcagttga

SEQ ID NO: 32017 - DNA, 21 bp, Homo sapiens
caactgatggytattaatgat

SEQ ID NO: 32018 - DNA, 21 bp, Homo sapiens
cctaaggcagwtattctacca

SEQ ID NO: 32019 - DNA, 21 bp, Homo sapiens
gttggacaatrttctaggtgc

SEQ ID NO: 32020 - DNA, 21 bp, Homo sapiens
tgagaagattyattgtatcat

SEQ ID NO: 32021 - DNA, 21 bp, Homo sapiens
atgttccttayatatccgttt

SEQ ID NO: 32022 - DNA, 21 bp, Homo sapiens
gttgactggcrgctataaacc

SEQ ID NO: 32023 - DNA, 21 bp, Homo sapiens
ttcatagtatycttcagtttc

SEQ ID NO: 32024 - DNA, 21 bp, Homo sapiens
aatttgtgctktctgaatcat

SEQ ID NO: 32025 - DNA, 21 bp, Homo sapiens
ggtcttccctrtggacctcaa

SEQ ID NO: 32026 - DNA, 21 bp, Homo sapiens
caggcatcagrgtgaggctgc

SEQ ID NO: 32027 - DNA, 21 bp, Homo sapiens
tgatactgacrtctgctttca

SEQ ID NO: 32028 - DNA, 21 bp, Homo sapiens
aacccagcccyacctcctccc

SEQ ID NO: 32029 - DNA, 21 bp, Homo sapiens
gaataaacggygtgattgcca

SEQ ID NO: 32030 - DNA, 21 bp, Homo sapiens
acaactgtgayttattctggc

SEQ ID NO: 32031 - DNA, 21 bp, Homo sapiens
tgaaggccctkgaggtgggca

SEQ ID NO: 32032 - DNA, 21 bp, Homo sapiens
tgcagggttayaagatgtact

SEQ ID NO: 32033 - DNA, 21 bp, Homo sapiens
tcgagcagccrgagagcgatg

SEQ ID NO: 32034 - DNA, 21 bp, Homo sapiens
gcccacctgtytctcttcctc

SEQ ID NO: 32035 - DNA, 21 bp, Homo sapiens
caggacctgtstgcattcatt

SEQ ID NO: 32036 - DNA, 21 bp, Homo sapiens
tctgctcagcrgtgaaaagaa

SEQ ID NO: 32037 - DNA, 21 bp, Homo sapiens
gcctccaatgsctctgtcact

SEQ ID NO: 32038 - DNA, 21 bp, Homo sapiens
ctgaaataggrgaaagcatcc

SEQ ID NO: 32039 - DNA, 21 bp, Homo sapiens
ggggtggtggrgacagcacag

SEQ ID NO: 32040 - DNA, 21 bp, Homo sapiens
acaacacaaaygtctacaagc

SEQ ID NO: 32041 - DNA, 21 bp, Homo sapiens
tattgttacasgagcctccct

SEQ ID NO: 32042 - DNA, 21 bp, Homo sapiens
gaggacttatraaaggaagaa

SEQ ID NO: 32043 - DNA, 21 bp, Homo sapiens
gggttctctgmgggaagtgga

SEQ ID NO: 32044 - DNA, 21 bp, Homo sapiens
atgaccactaygctgtttgct

SEQ ID NO: 32045 - DNA, 21 bp, Homo sapiens
aagtgttcccrtcacatcatc

SEQ ID NO: 32046 - DNA, 21 bp, Homo sapiens
ctgaaaaaggyatgtattctt

SEQ ID NO: 32047 - DNA, 21 bp, Homo sapiens
ccttgaactarcttcttttct

SEQ ID NO: 32048 - DNA, 21 bp, Homo sapiens
cctcagtttcygtgttagtac

SEQ ID NO: 32049 - DNA, 21 bp, Homo sapiens
ctctaggtgargtcagtgaaa

SEQ ID NO: 32050 - DNA, 21 bp, Homo sapiens
cgctccgtgtsgggatcctca

SEQ ID NO: 32051 - DNA, 21 bp, Homo sapiens
gtggaaaagaygcctcctgcc

SEQ ID NO: 32052 - DNA, 21 bp, Homo sapiens
tagtcacttgytgaggtctga

SEQ ID NO: 32053 - DNA, 21 bp, Homo sapiens
atgaaataacrttcctatttg

SEQ ID NO: 32054 - DNA, 21 bp, Homo sapiens
tcttccatttyggtggtaggc

SEQ ID NO: 32055 - DNA, 21 bp, Homo sapiens
catgtctgtcytaaccagtga

SEQ ID NO: 32056 - DNA, 21 bp, Homo sapiens
ttttacagacrccttcacaca

SEQ ID NO: 32057 - DNA, 21 bp, Homo sapiens
gattttgtttyaatgggctga

SEQ ID NO: 32058 - DNA, 21 bp, Homo sapiens
ggtttgtaagkgttgtttgac

SEQ ID NO: 32059 - DNA, 21 bp, Homo sapiens
aaaaaaggctkctttggtaca

SEQ ID NO: 32060 - DNA, 21 bp, Homo sapiens
ctccggctttrgagttctcta

SEQ ID NO: 32061 - DNA, 21 bp, Homo sapiens
caggttcaccygtaaacatgc

SEQ ID NO: 32062 - DNA, 21 bp, Homo sapiens
gcatacgggastagaccgggc

SEQ ID NO: 32063 - DNA, 21 bp, Homo sapiens
aaaaggctacmcattgagcca

SEQ ID NO: 32064 - DNA, 21 bp, Homo sapiens
tcaaccaagcygaaagtcttc

SEQ ID NO: 32065 - DNA, 21 bp, Homo sapiens
tggaagatatraattgagatg

SEQ ID NO: 32066 - DNA, 21 bp, Homo sapiens
gagtaaagggragtccattca

SEQ ID NO: 32067 - DNA, 21 bp, Homo sapiens
tttatgacacmcattttaaat

SEQ ID NO: 32068 - DNA, 21 bp, Homo sapiens
cactgggtagrgctcaaagga

SEQ ID NO: 32069 - DNA, 21 bp, Homo sapiens
ctgcctgcgamtgtctcctaa

SEQ ID NO: 32070 - DNA, 21 bp, Homo sapiens
ctgccttatascactattgtt

SEQ ID NO: 32071 - DNA, 21 bp, Homo sapiens
tcgacagtttktgtctatgtt

SEQ ID NO: 32072 - DNA, 21 bp, Homo sapiens
atttttcaggyagcaggatgg

SEQ ID NO: 32073 - DNA, 21 bp, Homo sapiens
gaaaagatgaygacaattgtc

SEQ ID NO: 32074 - DNA, 21 bp, Homo sapiens
tggagaaaacrtttcacctta

SEQ ID NO: 32075 - DNA, 21 bp, Homo sapiens
gaagttttgcyaagtagttga

SEQ ID NO: 32076 - DNA, 21 bp, Homo sapiens
atgcacatcckgagcactaaa

SEQ ID NO: 32077 - DNA, 21 bp, Homo sapiens
aaacttgaacraatcttaggc

SEQ ID NO: 32078 - DNA, 21 bp, Homo sapiens
aataactttcyttgtggccac

SEQ ID NO: 32079 - DNA, 21 bp, Homo sapiens
caccatgcacrctgacgcctt

SEQ ID NO: 32080 - DNA, 21 bp, Homo sapiens
acataaagaaktacaactcaa

SEQ ID NO: 32081 - DNA, 21 bp, Homo sapiens
aatgaaatacraatcaatcat

SEQ ID NO: 32082 - DNA, 21 bp, Homo sapiens
cacagatacayatccagaaaa

SEQ ID NO: 32083 - DNA, 21 bp, Homo sapiens
aaccagctttrgaagtaaact

SEQ ID NO: 32084 - DNA, 21 bp, Homo sapiens
agctgagacarttgataaagg

SEQ ID NO: 32085 - DNA, 21 bp, Homo sapiens
ataacaatgaygtggaatacg

SEQ ID NO: 32086 - DNA, 21 bp, Homo sapiens
agttcatttgyccctgttttg

SEQ ID NO: 32087 - DNA, 21 bp, Homo sapiens
ctgtaaagggyttgatcttgt

SEQ ID NO: 32088 - DNA, 21 bp, Homo sapiens
ataggaaagcygactgaattc

SEQ ID NO: 32089 - DNA, 21 bp, Homo sapiens
aatgacaatartgcacaagat

SEQ ID NO: 32090 - DNA, 21 bp, Homo sapiens
tcagttccctsgtcctggact

SEQ ID NO: 32091 - DNA, 21 bp, Homo sapiens
caataaacctrggatgaccta

SEQ ID NO: 32092 - DNA, 21 bp, Homo sapiens
cactctagagrtgagcattta

SEQ ID NO: 32093 - DNA, 21 bp, Homo sapiens
acacagtgacrcctcatttat

SEQ ID NO: 32094 - DNA, 21 bp, Homo sapiens
tatatgcagawgttaaagttc

SEQ ID NO: 32095 - DNA, 21 bp, Homo sapiens
gaaatttcgakttacctaaat

SEQ ID NO: 32096 - DNA, 21 bp, Homo sapiens
gaagtgaacaygtccgtctca

SEQ ID NO: 32097 - DNA, 21 bp, Homo sapiens
ttaggcatccygtattctatg

SEQ ID NO: 32098 - DNA, 21 bp, Homo sapiens
agaaatagaastgatgttgaa

SEQ ID NO: 32099 - DNA, 21 bp, Homo sapiens
gtggacaacaraatgtgaagc

SEQ ID NO: 32100 - DNA, 21 bp, Homo sapiens
actaatgtctyccaatttagg

SEQ ID NO: 32101 - DNA, 21 bp, Homo sapiens
tgcaagatacyagaatgtttg

SEQ ID NO: 32102 - DNA, 21 bp, Homo sapiens
ctagttaataygatgatctaa

SEQ ID NO: 32103 - DNA, 21 bp, Homo sapiens
ttccttgaacmttttaatttg

SEQ ID NO: 32104 - DNA, 21 bp, Homo sapiens
cagttagctamagatttcaag

SEQ ID NO: 32105 - DNA, 21 bp, Homo sapiens
attgttttccytaactaggta

SEQ ID NO: 32106 - DNA, 21 bp, Homo sapiens
cagatatgtastactatgcca

SEQ ID NO: 32107 - DNA, 21 bp, Homo sapiens
agatatatacrgaagtaacaa

SEQ ID NO: 32108 - DNA, 21 bp, Homo sapiens
cttctggtgtrccaaaatgtc

SEQ ID NO: 32109 - DNA, 21 bp, Homo sapiens
gttcaacttayacaaaacaag

SEQ ID NO: 32110 - DNA, 21 bp, Homo sapiens
ttgaaggtatygaggctatgt

SEQ ID NO: 32111 - DNA, 21 bp, Homo sapiens
tgtgctttctsctcctctgga

SEQ ID NO: 32112 - DNA, 21 bp, Homo sapiens
tgaaaatatcygagcctctgc

SEQ ID NO: 32113 - DNA, 21 bp, Homo sapiens
tgtatttgtcrtagtagcttt

SEQ ID NO: 32114 - DNA, 21 bp, Homo sapiens
atcccattttstcttcacaat

SEQ ID NO: 32115 - DNA, 21 bp, Homo sapiens
actcaggcccratcttacttt

SEQ ID NO: 32116 - DNA, 21 bp, Homo sapiens
tgtcccagacsaaagttcttt

SEQ ID NO: 32117 - DNA, 21 bp, Homo sapiens
cacctcaagtmtctgctcccc

SEQ ID NO: 32118 - DNA, 21 bp, Homo sapiens
gaaatagagaygttgaaagaa

SEQ ID NO: 32119 - DNA, 21 bp, Homo sapiens
gcaccagcaartatttaatgc

SEQ ID NO: 32120 - DNA, 21 bp, Homo sapiens
tgtgcatctgmatttctcctc

SEQ ID NO: 32121 - DNA, 21 bp, Homo sapiens
tcgtgcattcrataaagacag

SEQ ID NO: 32122 - DNA, 21 bp, Homo sapiens
accctccactrgattcccctt

SEQ ID NO: 32123 - DNA, 21 bp, Homo sapiens
tttcctttgargtaataattt

SEQ ID NO: 32124 - DNA, 21 bp, Homo sapiens
ttgaaagtagygcatttcact

SEQ ID NO: 32125 - DNA, 21 bp, Homo sapiens
agcgacagatkaaaaacagca

SEQ ID NO: 32126 - DNA, 21 bp, Homo sapiens
agtatcatggrctacattcac

SEQ ID NO: 32127 - DNA, 21 bp, Homo sapiens
ggaatagagamtctgtgaggg

SEQ ID NO: 32128 - DNA, 21 bp, Homo sapiens
atcatccccaytgtttttcta

SEQ ID NO: 32129 - DNA, 21 bp, Homo sapiens
gaacatctggytatcataccc

SEQ ID NO: 32130 - DNA, 21 bp, Homo sapiens
cccacaagatygttctccact

SEQ ID NO: 32131 - DNA, 21 bp, Homo sapiens
aataagactayaggccagaat

SEQ ID NO: 32132 - DNA, 21 bp, Homo sapiens
ttatgcaggcrtctttgatct

SEQ ID NO: 32133 - DNA, 21 bp, Homo sapiens
ttcctagaagmctgatgataa

SEQ ID NO: 32134 - DNA, 21 bp, Homo sapiens
cacccaggtgrtttcaatcgt

SEQ ID NO: 32135 - DNA, 21 bp, Homo sapiens
cgaagaggtcrtatccaaaga

SEQ ID NO: 32136 - DNA, 21 bp, Homo sapiens
gaagcttgtamcataatgctg

SEQ ID NO: 32137 - DNA, 21 bp, Homo sapiens
gataaaatgtsaagataaacg

SEQ ID NO: 32138 - DNA, 21 bp, Homo sapiens
gcctctaagaytcgccttgcc

SEQ ID NO: 32139 - DNA, 21 bp, Homo sapiens
catgccagttragctagttga

SEQ ID NO: 32140 - DNA, 21 bp, Homo sapiens
atggtgacacyctaagctgtt

SEQ ID NO: 32141 - DNA, 21 bp, Homo sapiens
tagattatgayggtttaattg

SEQ ID NO: 32142 - DNA, 21 bp, Homo sapiens
tgtcttccatrgccacaatgg

SEQ ID NO: 32143 - DNA, 21 bp, Homo sapiens
agtgccttatytacaaatttg

SEQ ID NO: 32144 - DNA, 21 bp, Homo sapiens
acagaattaartcaggggtct

SEQ ID NO: 32145 - DNA, 21 bp, Homo sapiens
tctctaatgaygagcttcatt

SEQ ID NO: 32146 - DNA, 21 bp, Homo sapiens
agcacttaatktatgtatcat

SEQ ID NO: 32147 - DNA, 21 bp, Homo sapiens
gtcagacaagstcttgattca

SEQ ID NO: 32148 - DNA, 21 bp, Homo sapiens
agactgctcasggatccagac

SEQ ID NO: 32149 - DNA, 21 bp, Homo sapiens
tgctgatttgygtgtagctgc

SEQ ID NO: 32150 - DNA, 21 bp, Homo sapiens
ttaacttcagrtcatctttag

SEQ ID NO: 32151 - DNA, 21 bp, Homo sapiens
gttaattcctycattctgcaa

SEQ ID NO: 32152 - DNA, 21 bp, Homo sapiens
tgaactcttcrtagcaaactc

SEQ ID NO: 32153 - DNA, 21 bp, Homo sapiens
tacagtcctcrtgatgttgga

SEQ ID NO: 32154 - DNA, 21 bp, Homo sapiens
ggccatgaagratggatgggc

SEQ ID NO: 32155 - DNA, 21 bp, Homo sapiens
caaggctctarataatttgaa

SEQ ID NO: 32156 - DNA, 21 bp, Homo sapiens
atttatatagmaaacttgatt

SEQ ID NO: 32157 - DNA, 21 bp, Homo sapiens
aatcatcaagsctgaggggct

SEQ ID NO: 32158 - DNA, 21 bp, Homo sapiens
tgagagctgcsgactggacag

SEQ ID NO: 32159 - DNA, 21 bp, Homo sapiens
tcatattcacrtgtgttagag

SEQ ID NO: 32160 - DNA, 21 bp, Homo sapiens
gaccgcacaayctaggctaat

SEQ ID NO: 32161 - DNA, 21 bp, Homo sapiens
acatgttaggygctgtgaatg

SEQ ID NO: 32162 - DNA, 21 bp, Homo sapiens
gggaaagctcytggtgagtga

SEQ ID NO: 32163 - DNA, 21 bp, Homo sapiens
gtcacaggaarggttgtcatg

SEQ ID NO: 32164 - DNA, 21 bp, Homo sapiens
tgaccagttakcattagttcc

SEQ ID NO: 32165 - DNA, 21 bp, Homo sapiens
gataactgatrttcattcatg

SEQ ID NO: 32166 - DNA, 21 bp, Homo sapiens
tacgtaagtgrtttagtggtt

SEQ ID NO: 32167 - DNA, 21 bp, Homo sapiens
gatgtccatayggttattaag

SEQ ID NO: 32168 - DNA, 21 bp, Homo sapiens
tctgggacctycccaggtgcc

SEQ ID NO: 32169 - DNA, 21 bp, Homo sapiens
atctgtctgcrccggtgtcac

SEQ ID NO: 32170 - DNA, 21 bp, Homo sapiens
cagttcctggmacctatacca

SEQ ID NO: 32171 - DNA, 21 bp, Homo sapiens
ccttcatggtscagtaaggtt

SEQ ID NO: 32172 - DNA, 21 bp, Homo sapiens
gcctcctgccyagctgtctcc

SEQ ID NO: 32173 - DNA, 21 bp, Homo sapiens
ttgcttttctygcgaatggac

SEQ ID NO: 32174 - DNA, 21 bp, Homo sapiens
cccatgtaatragacaagaaa

SEQ ID NO: 32175 - DNA, 21 bp, Homo sapiens
ttaggaaatgygtcccagcct

SEQ ID NO: 32176 - DNA, 21 bp, Homo sapiens
atagctactcragagaaatga

SEQ ID NO: 32177 - DNA, 21 bp, Homo sapiens
agtgaggggcmggataggggt

SEQ ID NO: 32178 - DNA, 21 bp, Homo sapiens
gggccaggccygcccggcacc

SEQ ID NO: 32179 - DNA, 21 bp, Homo sapiens
ggtaattgtaytttaagaata

SEQ ID NO: 32180 - DNA, 21 bp, Homo sapiens
cttggttacartgaattagcc

SEQ ID NO: 32181 - DNA, 21 bp, Homo sapiens
tagattatgcmccctcttaat

SEQ ID NO: 32182 - DNA, 21 bp, Homo sapiens
ccgtgggtgcyggacagcttg

SEQ ID NO: 32183 - DNA, 21 bp, Homo sapiens
ttaaaggggakttgggcaggg

SEQ ID NO: 32184 - DNA, 21 bp, Homo sapiens
gacgtatcccrtaaaagatac

SEQ ID NO: 32185 - DNA, 21 bp, Homo sapiens
cttgcagattrttgggcatgt

SEQ ID NO: 32186 - DNA, 21 bp, Homo sapiens
ttcttcacaartagactcttc

SEQ ID NO: 32187 - DNA, 21 bp, Homo sapiens
accttgttcawgggccttttg

SEQ ID NO: 32188 - DNA, 21 bp, Homo sapiens
tatcaaagtgrcagattatat

SEQ ID NO: 32189 - DNA, 21 bp, Homo sapiens
tagttcatgarttttgattgt

SEQ ID NO: 32190 - DNA, 21 bp, Homo sapiens
gactgatgtgkatttcttatt

SEQ ID NO: 32191 - DNA, 21 bp, Homo sapiens
gaaaagctgargataattaat

SEQ ID NO: 32192 - DNA, 21 bp, Homo sapiens
caaagagtaaygcagataatg

SEQ ID NO: 32193 - DNA, 21 bp, Homo sapiens
ccaccatgccrcccaggcttc

SEQ ID NO: 32194 - DNA, 21 bp, Homo sapiens
ctaaacctcartgcattgctc

SEQ ID NO: 32195 - DNA, 21 bp, Homo sapiens
ctgtggagggycagggatgca

SEQ ID NO: 32196 - DNA, 21 bp, Homo sapiens
aactcacactkaactgtcagt

SEQ ID NO: 32197 - DNA, 21 bp, Homo sapiens
tggtgaagacrtgggccgtca

SEQ ID NO: 32198 - DNA, 21 bp, Homo sapiens
gtgaccagggkctgactctag

SEQ ID NO: 32199 - DNA, 21 bp, Homo sapiens
cgaccaggctyggccctcgac

SEQ ID NO: 32200 - DNA, 21 bp, Homo sapiens
agggcttcccyggcgtgccca

SEQ ID NO: 32201 - DNA, 21 bp, Homo sapiens
agaactgctgwtgtgagggac

SEQ ID NO: 32202 - DNA, 21 bp, Homo sapiens
ccatgggaatygggatgtttg

SEQ ID NO: 32203 - DNA, 21 bp, Homo sapiens
gggccctagayagatcaaggc

SEQ ID NO: 32204 - DNA, 21 bp, Homo sapiens
tagtatgatayattggtcaat

SEQ ID NO: 32205 - DNA, 21 bp, Homo sapiens
catggggttcrgaagattgct

SEQ ID NO: 32206 - DNA, 21 bp, Homo sapiens
atcgagagccmggtgacttct

SEQ ID NO: 32207 - DNA, 21 bp, Homo sapiens
tgggtcatacygagaaaaatt

SEQ ID NO: 32208 - DNA, 21 bp, Homo sapiens
ttctccacccrggagacacca

SEQ ID NO: 32209 - DNA, 21 bp, Homo sapiens
tcataatgacsacaagactgg

SEQ ID NO: 32210 - DNA, 21 bp, Homo sapiens
aaaatattgcyaaaagatgta

SEQ ID NO: 32211 - DNA, 21 bp, Homo sapiens
aagtggaagayagcacgccac

SEQ ID NO: 32212 - DNA, 21 bp, Homo sapiens
agagaagatargaacgaaagt

SEQ ID NO: 32213 - DNA, 21 bp, Homo sapiens
ctgccattttytttcctaacc

SEQ ID NO: 32214 - DNA, 21 bp, Homo sapiens
actgtaaatarccaaataaca

SEQ ID NO: 32215 - DNA, 21 bp, Homo sapiens
aggccctaggygtgggcaatg

SEQ ID NO: 32216 - DNA, 21 bp, Homo sapiens
ctgacaatttwtatacacttg

SEQ ID NO: 32217 - DNA, 21 bp, Homo sapiens
aaatcaagcartgcctaacta

SEQ ID NO: 32218 - DNA, 21 bp, Homo sapiens
ttgaagcaaartttgtagtgt

SEQ ID NO: 32219 - DNA, 21 bp, Homo sapiens
tagttaacacrctttaaaaga

SEQ ID NO: 32220 - DNA, 21 bp, Homo sapiens
gatgatgatgrtaaaaaacag

SEQ ID NO: 32221 - DNA, 21 bp, Homo sapiens
aagaagtcccrctgatgaaga

SEQ ID NO: 32222 - DNA, 21 bp, Homo sapiens
cagagctcaaygtaagaactt

SEQ ID NO: 32223 - DNA, 21 bp, Homo sapiens
tacccaaagcrgatgctcaga

SEQ ID NO: 32224 - DNA, 21 bp, Homo sapiens
acctaatgaamaggatgtcca

SEQ ID NO: 32225 - DNA, 21 bp, Homo sapiens
ctttgctagcrctcaaggtgc

SEQ ID NO: 32226 - DNA, 21 bp, Homo sapiens
gcatccaggawctcaagggac

SEQ ID NO: 32227 - DNA, 21 bp, Homo sapiens
gtgtcacagartaagtgcaaa

SEQ ID NO: 32228 - DNA, 21 bp, Homo sapiens
atctgattatyaagcagtaac

SEQ ID NO: 32229 - DNA, 21 bp, Homo sapiens
ttcccattccrcaggagcttc

SEQ ID NO: 32230 - DNA, 21 bp, Homo sapiens
atggtattcarttatgatttc

SEQ ID NO: 32231 - DNA, 21 bp, Homo sapiens
gttttggcatrggagaaaatg

SEQ ID NO: 32232 - DNA, 21 bp, Homo sapiens
tgtaataggcractgaagtga

SEQ ID NO: 32233 - DNA, 21 bp, Homo sapiens
gggacctcctmtccagtaagt

SEQ ID NO: 32234 - DNA, 21 bp, Homo sapiens
gagagaaattraaagagacct

SEQ ID NO: 32235 - DNA, 21 bp, Homo sapiens
ataatttttgyctgttttgat

SEQ ID NO: 32236 - DNA, 21 bp, Homo sapiens
aagactatgcrtttgtcaaac

SEQ ID NO: 32237 - DNA, 21 bp, Homo sapiens
atttaacaggrtacctgacca

SEQ ID NO: 32238 - DNA, 21 bp, Homo sapiens
gttttagcctstgggtttctg

SEQ ID NO: 32239 - DNA, 21 bp, Homo sapiens
gatatagtttyatacatatag

SEQ ID NO: 32240 - DNA, 21 bp, Homo sapiens
tctgggcctaygtaggtgttt

SEQ ID NO: 32241 - DNA, 21 bp, Homo sapiens
gttctttcagrcagactcagg

SEQ ID NO: 32242 - DNA, 21 bp, Homo sapiens
caccgtctccygggtctcaga

SEQ ID NO: 32243 - DNA, 21 bp, Homo sapiens
acccagcagcrgactttacaa

SEQ ID NO: 32244 - DNA, 21 bp, Homo sapiens
ccacttacctsctatgtgacc

SEQ ID NO: 32245 - DNA, 21 bp, Homo sapiens
caaatacccarttcaacaaga

SEQ ID NO: 32246 - DNA, 21 bp, Homo sapiens
ttaagcgagakaacatttatt

SEQ ID NO: 32247 - DNA, 21 bp, Homo sapiens
tggctgctgcwatgtccacca

SEQ ID NO: 32248 - DNA, 21 bp, Homo sapiens
tgataaaatarttctgtctgt

SEQ ID NO: 32249 - DNA, 21 bp, Homo sapiens
aataacattgrttttgagtga

SEQ ID NO: 32250 - DNA, 21 bp, Homo sapiens
atggaggcggrattaataaca

SEQ ID NO: 32251 - DNA, 21 bp, Homo sapiens
ctataagcaarccatttctta

SEQ ID NO: 32252 - DNA, 21 bp, Homo sapiens
gattttattcrtaacaaaggt

SEQ ID NO: 32253 - DNA, 21 bp, Homo sapiens
caactgaagayggtatgatca

SEQ ID NO: 32254 - DNA, 21 bp, Homo sapiens
gctttgaccakcacaaccctt

SEQ ID NO: 32255 - DNA, 21 bp, Homo sapiens
ttgttagtgtwccttaaaggc

SEQ ID NO: 32256 - DNA, 21 bp, Homo sapiens
gattgtgatayggactagtct

SEQ ID NO: 32257 - DNA, 21 bp, Homo sapiens
ataaaagcaamgcccagaaag

SEQ ID NO: 32258 - DNA, 21 bp, Homo sapiens
ccttcatttckcttgctatga

SEQ ID NO: 32259 - DNA, 21 bp, Homo sapiens
ctgattcaaarcagacctaca

SEQ ID NO: 32260 - DNA, 21 bp, Homo sapiens
aacaaagaggytgatttaaca

SEQ ID NO: 32261 - DNA, 21 bp, Homo sapiens
atgatgcagayatccgggtct

SEQ ID NO: 32262 - DNA, 21 bp, Homo sapiens
ctttgctgtgkggtaataatt

SEQ ID NO: 32263 - DNA, 21 bp, Homo sapiens
cggcaacaagmagttaattct

SEQ ID NO: 32264 - DNA, 21 bp, Homo sapiens
taagtccatcrgatcatcaga

SEQ ID NO: 32265 - DNA, 21 bp, Homo sapiens
ccaagacaatytttcatagag

SEQ ID NO: 32266 - DNA, 21 bp, Homo sapiens
gggaggtggtrtgaacatgaa

SEQ ID NO: 32267 - DNA, 21 bp, Homo sapiens
caaagctttcrtgttcaaaac

SEQ ID NO: 32268 - DNA, 21 bp, Homo sapiens
agaatatgttrgagaaatctt

SEQ ID NO: 32269 - DNA, 21 bp, Homo sapiens
aatggaacttyagcaacacgt

SEQ ID NO: 32270 - DNA, 21 bp, Homo sapiens
aatctgccatktttggtatta

SEQ ID NO: 32271 - DNA, 21 bp, Homo sapiens
gggagcagcamagggggagac

SEQ ID NO: 32272 - DNA, 21 bp, Homo sapiens
accactccacyctggcgctgg

SEQ ID NO: 32273 - DNA, 21 bp, Homo sapiens
catgggcttayacagatgtga

SEQ ID NO: 32274 - DNA, 21 bp, Homo sapiens
ttttcttagcwctgtagttga

SEQ ID NO: 32275 - DNA, 21 bp, Homo sapiens
acataatgggragccagcttt

SEQ ID NO: 32276 - DNA, 21 bp, Homo sapiens
ccaaccccacrgccaggtttt

SEQ ID NO: 32277 - DNA, 21 bp, Homo sapiens
tatttagaaawgagccgcaat

SEQ ID NO: 32278 - DNA, 21 bp, Homo sapiens
gtgtgaagggyggacggagag

SEQ ID NO: 32279 - DNA, 21 bp, Homo sapiens
gaatacgaagygaagcgctaa

SEQ ID NO: 32280 - DNA, 21 bp, Homo sapiens
taggggacatrtaactctctt

SEQ ID NO: 32281 - DNA, 21 bp, Homo sapiens
gtaataaaatygtcaaaaata

SEQ ID NO: 32282 - DNA, 21 bp, Homo sapiens
tgtggttgtcmgcctgaaaga

SEQ ID NO: 32283 - DNA, 21 bp, Homo sapiens
atatagcaatwctctaaattt

SEQ ID NO: 32284 - DNA, 21 bp, Homo sapiens
ccaaaggacaycctggaaact

SEQ ID NO: 32285 - DNA, 21 bp, Homo sapiens
attaggaataygcaaacatta

SEQ ID NO: 32286 - DNA, 21 bp, Homo sapiens
ataagggtgckagaccaagat

SEQ ID NO: 32287 - DNA, 21 bp, Homo sapiens
tcctcattcaraattgttatt

SEQ ID NO: 32288 - DNA, 21 bp, Homo sapiens
gttgccagcaytcagagcctc

SEQ ID NO: 32289 - DNA, 21 bp, Homo sapiens
tagtatgtacmtagttttgac

SEQ ID NO: 32290 - DNA, 21 bp, Homo sapiens
taaaatttgtyaaattgtttc

SEQ ID NO: 32291 - DNA, 21 bp, Homo sapiens
ctgaagaccaycctgttgcta

SEQ ID NO: 32292 - DNA, 21 bp, Homo sapiens
ggcatattacraaggcctggg

SEQ ID NO: 32293 - DNA, 21 bp, Homo sapiens
tagcctggttygaattcttcc

SEQ ID NO: 32294 - DNA, 21 bp, Homo sapiens
agcccagagtrgcaacagctg

SEQ ID NO: 32295 - DNA, 21 bp, Homo sapiens
cagagggcacrtcaataccag

SEQ ID NO: 32296 - DNA, 21 bp, Homo sapiens
atggccctgtyccttagaaac

SEQ ID NO: 32297 - DNA, 21 bp, Homo sapiens
tcccgtcgaargttgatatta

SEQ ID NO: 32298 - DNA, 21 bp, Homo sapiens
aaagaaacagraatgggatgc

SEQ ID NO: 32299 - DNA, 21 bp, Homo sapiens
cattcaaggaractactgagc

SEQ ID NO: 32300 - DNA, 21 bp, Homo sapiens
cactactggcycaaagattca

SEQ ID NO: 32301 - DNA, 21 bp, Homo sapiens
ctttccaaatkacaggaacac

SEQ ID NO: 32302 - DNA, 21 bp, Homo sapiens
tttttttctarcggaaggaag

SEQ ID NO: 32303 - DNA, 21 bp, Homo sapiens
ttatagaagartttccagaac

SEQ ID NO: 32304 - DNA, 21 bp, Homo sapiens
gttgcttattmagttatctta

SEQ ID NO: 32305 - DNA, 21 bp, Homo sapiens
ctcttcctggmcagcctaact

SEQ ID NO: 32306 - DNA, 21 bp, Homo sapiens
tttggtgatamcttttggagt

SEQ ID NO: 32307 - DNA, 21 bp, Homo sapiens
gtcaacttctytccagctagg

SEQ ID NO: 32308 - DNA, 21 bp, Homo sapiens
gcatattaccrtcacccagaa

SEQ ID NO: 32309 - DNA, 21 bp, Homo sapiens
acttagcagtracatttttga

SEQ ID NO: 32310 - DNA, 21 bp, Homo sapiens
ctaagaaaagraaaagagtat

SEQ ID NO: 32311 - DNA, 21 bp, Homo sapiens
catcagcactmtcagctctat

SEQ ID NO: 32312 - DNA, 21 bp, Homo sapiens
tgctgacctgraggtgaccat

SEQ ID NO: 32313 - DNA, 21 bp, Homo sapiens
tttcctattamattctgtttt

SEQ ID NO: 32314 - DNA, 21 bp, Homo sapiens
gaactgcaccrgaaaatcaga

SEQ ID NO: 32315 - DNA, 21 bp, Homo sapiens
ccattccttayacacacaggt

SEQ ID NO: 32316 - DNA, 21 bp, Homo sapiens
tcttggcaacmgaggccgagg

SEQ ID NO: 32317 - DNA, 21 bp, Homo sapiens
gactagtctgkgctgaacata

SEQ ID NO: 32318 - DNA, 21 bp, Homo sapiens
gaaccctcaasccaggagcca

SEQ ID NO: 32319 - DNA, 21 bp, Homo sapiens
agacaatccgycattaatctt

SEQ ID NO: 32320 - DNA, 21 bp, Homo sapiens
acataggaagyttttcttaaa

SEQ ID NO: 32321 - DNA, 21 bp, Homo sapiens
cctgttcatcytagagaaggt

SEQ ID NO: 32322 - DNA, 21 bp, Homo sapiens
tgcctaagaasaggtctgagc

SEQ ID NO: 32323 - DNA, 21 bp, Homo sapiens
gcttacaaagsacttacacac

SEQ ID NO: 32324 - DNA, 21 bp, Homo sapiens
tgtcttcacaytgggacaacc

SEQ ID NO: 32325 - DNA, 21 bp, Homo sapiens
ttcctgatacrattctggtta

SEQ ID NO: 32326 - DNA, 21 bp, Homo sapiens
ctcgtggcccrgaagagaggt

SEQ ID NO: 32327 - DNA, 21 bp, Homo sapiens
gggaacccacrtctgcttgta

SEQ ID NO: 32328 - DNA, 21 bp, Homo sapiens
ctttaggtggyaggctggaaa

SEQ ID NO: 32329 - DNA, 21 bp, Homo sapiens
atacatacgcktaaccaacaa

SEQ ID NO: 32330 - DNA, 21 bp, Homo sapiens
tcgtgtcagcytctgagacta

SEQ ID NO: 32331 - DNA, 21 bp, Homo sapiens
aactgcctttrtctcaaccta

SEQ ID NO: 32332 - DNA, 21 bp, Homo sapiens
tgttggtttaygaagtgatgg

SEQ ID NO: 32333 - DNA, 21 bp, Homo sapiens
agttgagatcyggacattaca

SEQ ID NO: 32334 - DNA, 21 bp, Homo sapiens
ctcaagtcatrttctgtctgt

SEQ ID NO: 32335 - DNA, 21 bp, Homo sapiens
tgctgctcagracttaggaga

SEQ ID NO: 32336 - DNA, 21 bp, Homo sapiens
agctggagacygacttgtggg

SEQ ID NO: 32337 - DNA, 21 bp, Homo sapiens
caccatgatartcttactctc

SEQ ID NO: 32338 - DNA, 21 bp, Homo sapiens
aaactcggagyacgtacagag

SEQ ID NO: 32339 - DNA, 21 bp, Homo sapiens
cctggctcaaytcagcctttt

SEQ ID NO: 32340 - DNA, 21 bp, Homo sapiens
aaaggtcagtrttagtaagtg

SEQ ID NO: 32341 - DNA, 21 bp, Homo sapiens
cctgataaagytgtagagaag

SEQ ID NO: 32342 - DNA, 21 bp, Homo sapiens
ttgcttccatyttagcagcca

SEQ ID NO: 32343 - DNA, 21 bp, Homo sapiens
gtatttctaayccttctttca

SEQ ID NO: 32344 - DNA, 21 bp, Homo sapiens
acgtggtaagkgacagttgcc

SEQ ID NO: 32345 - DNA, 21 bp, Homo sapiens
tcagggccgtyctgggggtgt

SEQ ID NO: 32346 - DNA, 21 bp, Homo sapiens
tcatagccctygcagacctct

SEQ ID NO: 32347 - DNA, 21 bp, Homo sapiens
caggaggcgayaccaggccag

SEQ ID NO: 32348 - DNA, 21 bp, Homo sapiens
cctctggtcaygttctgatgt

SEQ ID NO: 32349 - DNA, 21 bp, Homo sapiens
gactatcaccrtccaaaactc

SEQ ID NO: 32350 - DNA, 21 bp, Homo sapiens
ggactggaggsacttcatgac

SEQ ID NO: 32351 - DNA, 21 bp, Homo sapiens
aagtccttaaraaaactaaga

SEQ ID NO: 32352 - DNA, 21 bp, Homo sapiens
taaccaccaaygagaacagac

SEQ ID NO: 32353 - DNA, 21 bp, Homo sapiens
gctcttgagawttagcccctg

SEQ ID NO: 32354 - DNA, 21 bp, Homo sapiens
gcaggcagtckctacaccctt

SEQ ID NO: 32355 - DNA, 21 bp, Homo sapiens
ttgtacttcgygaattgtctg

SEQ ID NO: 32356 - DNA, 21 bp, Homo sapiens
tccctgtcctyggcaacagaa

SEQ ID NO: 32357 - DNA, 21 bp, Homo sapiens
ctgacttcccragtatctgct

SEQ ID NO: 32358 - DNA, 21 bp, Homo sapiens
caatgttcccyggttaaaaaa

SEQ ID NO: 32359 - DNA, 21 bp, Homo sapiens
tttgactgttkagtaacttgg

SEQ ID NO: 32360 - DNA, 21 bp, Homo sapiens
atctgaggaayaaaaggaatc

SEQ ID NO: 32361 - DNA, 21 bp, Homo sapiens
cctgggtgctrtatgttgtgt

SEQ ID NO: 32362 - DNA, 21 bp, Homo sapiens
tgctgtaagaygaatgtgaag

SEQ ID NO: 32363 - DNA, 21 bp, Homo sapiens
aaagaatatasatgcttgcct

SEQ ID NO: 32364 - DNA, 21 bp, Homo sapiens
taaaaacaacrgaagtacctt

SEQ ID NO: 32365 - DNA, 21 bp, Homo sapiens
caccttactaytaaagcaaaa

SEQ ID NO: 32366 - DNA, 21 bp, Homo sapiens
acaaaattcargaccggaaaa

SEQ ID NO: 32367 - DNA, 21 bp, Homo sapiens
tgtctctcttmcttaaatttg

SEQ ID NO: 32368 - DNA, 21 bp, Homo sapiens
aaaagcttaarttacaaataa

SEQ ID NO: 32369 - DNA, 21 bp, Homo sapiens
atacacatttrcagttgtgcc

SEQ ID NO: 32370 - DNA, 21 bp, Homo sapiens
aattttctctwatcagccaga

SEQ ID NO: 32371 - DNA, 21 bp, Homo sapiens
gcagcataccwcgtttcggtc

SEQ ID NO: 32372 - DNA, 21 bp, Homo sapiens
attccgctaawacttgaacac

SEQ ID NO: 32373 - DNA, 21 bp, Homo sapiens
ccctggttccyccgtgcccac

SEQ ID NO: 32374 - DNA, 21 bp, Homo sapiens
gagaagaaaayaaccagctct

SEQ ID NO: 32375 - DNA, 21 bp, Homo sapiens
agctaggaaartaactcagga

SEQ ID NO: 32376 - DNA, 21 bp, Homo sapiens
ttgtttccacytgaggactga

SEQ ID NO: 32377 - DNA, 21 bp, Homo sapiens
gtcccctcccyagccccatcc

SEQ ID NO: 32378 - DNA, 21 bp, Homo sapiens
agtggttgagyggggagtgaa

SEQ ID NO: 32379 - DNA, 21 bp, Homo sapiens
ggtacaggtaytcacctcctt

SEQ ID NO: 32380 - DNA, 21 bp, Homo sapiens
ttcttcttttmatgctgtcct

SEQ ID NO: 32381 - DNA, 21 bp, Homo sapiens
gccttgggggkgctctagcgc

SEQ ID NO: 32382 - DNA, 21 bp, Homo sapiens
cactgctcaayccccagaacc

SEQ ID NO: 32383 - DNA, 21 bp, Homo sapiens
ttgggggagcstggaaataca

SEQ ID NO: 32384 - DNA, 21 bp, Homo sapiens
acatcccgggrccgtgggaga

SEQ ID NO: 32385 - DNA, 21 bp, Homo sapiens
tgcgctcattscaactttgaa

SEQ ID NO: 32386 - DNA, 21 bp, Homo sapiens
tggccttatgsaacccccagg

SEQ ID NO: 32387 - DNA, 21 bp, Homo sapiens
gcctgggatcrtccgtggaga

SEQ ID NO: 32388 - DNA, 21 bp, Homo sapiens
gggagctcccyggtgtacagt

SEQ ID NO: 32389 - DNA, 21 bp, Homo sapiens
tctctgcggcscccgaccacc

SEQ ID NO: 32390 - DNA, 21 bp, Homo sapiens
tgtctccaacraccagggcag

SEQ ID NO: 32391 - DNA, 21 bp, Homo sapiens
caggctggtcrccatgtcttc

SEQ ID NO: 32392 - DNA, 21 bp, Homo sapiens
atctgaaatcygggtgccatc

SEQ ID NO: 32393 - DNA, 21 bp, Homo sapiens
tgggggcctcrgcaaacatga

SEQ ID NO: 32394 - DNA, 21 bp, Homo sapiens
tgtcatacatkgttggaaacg

SEQ ID NO: 32395 - DNA, 21 bp, Homo sapiens
ggaggcccggycttgaatgac

SEQ ID NO: 32396 - DNA, 21 bp, Homo sapiens
cacggtcgtcrcgtcagcacg

SEQ ID NO: 32397 - DNA, 21 bp, Homo sapiens
ataagtgtaartcgtgacagt

SEQ ID NO: 32398 - DNA, 21 bp, Homo sapiens
ttctttcactsaagtgcctcc

SEQ ID NO: 32399 - DNA, 21 bp, Homo sapiens
actatatggcrcttggaatgt

SEQ ID NO: 32400 - DNA, 21 bp, Homo sapiens
catatgcacaraatactgtag

SEQ ID NO: 32401 - DNA, 21 bp, Homo sapiens
ccgacatgctsacagccagaa

SEQ ID NO: 32402 - DNA, 21 bp, Homo sapiens
gcaaagaactkcctcattctt

SEQ ID NO: 32403 - DNA, 21 bp, Homo sapiens
tctatttcacrtattttaacc

SEQ ID NO: 32404 - DNA, 21 bp, Homo sapiens
ctcccagcaayatttcaacag

SEQ ID NO: 32405 - DNA, 21 bp, Homo sapiens
agcaaacagamaaagtgtgaa

SEQ ID NO: 32406 - DNA, 21 bp, Homo sapiens
cctgtggtctygtaaaacatc

SEQ ID NO: 32407 - DNA, 21 bp, Homo sapiens
tctaacccctrttctttgctt

SEQ ID NO: 32408 - DNA, 21 bp, Homo sapiens
tggatgaaggrcgagggtgca

SEQ ID NO: 32409 - DNA, 21 bp, Homo sapiens
tcacattttcrttgaggagga

SEQ ID NO: 32410 - DNA, 21 bp, Homo sapiens
cttcctccctygagccacaga

SEQ ID NO: 32411 - DNA, 21 bp, Homo sapiens
atatacaagaygcaaatagca

SEQ ID NO: 32412 - DNA, 21 bp, Homo sapiens
tgtctccctcraggagccagt

SEQ ID NO: 32413 - DNA, 21 bp, Homo sapiens
tcccaggaagytaatactcat

SEQ ID NO: 32414 - DNA, 21 bp, Homo sapiens
agaagtgtacrgtaatagcat

SEQ ID NO: 32415 - DNA, 21 bp, Homo sapiens
ttcttgaatcytgtgttcagc

SEQ ID NO: 32416 - DNA, 21 bp, Homo sapiens
gtggcagcatyccggcccggt

SEQ ID NO: 32417 - DNA, 21 bp, Homo sapiens
aaggaggaggrgagaagtttc

SEQ ID NO: 32418 - DNA, 21 bp, Homo sapiens
ttcagggaaaragataacgaa

SEQ ID NO: 32419 - DNA, 21 bp, Homo sapiens
ggtcacttccrtgcatttgtt

SEQ ID NO: 32420 - DNA, 21 bp, Homo sapiens
gcctggtcccrcgtcctcatc

SEQ ID NO: 32421 - DNA, 21 bp, Homo sapiens
tccagcatttytgagggctcc

SEQ ID NO: 32422 - DNA, 21 bp, Homo sapiens
atcatcttacytgacttacgg

SEQ ID NO: 32423 - DNA, 21 bp, Homo sapiens
gcttacaggarattaaacaga

SEQ ID NO: 32424 - DNA, 21 bp, Homo sapiens
cttcttcatcrgggaaagaaa

SEQ ID NO: 32425 - DNA, 21 bp, Homo sapiens
tgtgcggcgcrgaatagaggc

SEQ ID NO: 32426 - DNA, 21 bp, Homo sapiens
gagaattcaamaagaaaggag

SEQ ID NO: 32427 - DNA, 21 bp, Homo sapiens
tccactcactraatattatac

SEQ ID NO: 32428 - DNA, 21 bp, Homo sapiens
tccaaggcacycgctcagcat

SEQ ID NO: 32429 - DNA, 21 bp, Homo sapiens
tatagtatttyatcaagagaa

SEQ ID NO: 32430 - DNA, 21 bp, Homo sapiens
gtgggaccacrtaaaactgta

SEQ ID NO: 32431 - DNA, 21 bp, Homo sapiens
gtcaatgcaaygaacacagcg

SEQ ID NO: 32432 - DNA, 21 bp, Homo sapiens
ttttgatcatracgcactgca

SEQ ID NO: 32433 - DNA, 21 bp, Homo sapiens
gcggtgaaccrgtggttgtct

SEQ ID NO: 32434 - DNA, 21 bp, Homo sapiens
ccctcacccgyggcttccacc

SEQ ID NO: 32435 - DNA, 21 bp, Homo sapiens
tggcacctggktattcacttg

SEQ ID NO: 32436 - DNA, 21 bp, Homo sapiens
ccgggtctctytctcctctgt

SEQ ID NO: 32437 - DNA, 21 bp, Homo sapiens
ctgtgttggtygggggctcac

SEQ ID NO: 32438 - DNA, 21 bp, Homo sapiens
aagcacctgcrtgtgagcggc

SEQ ID NO: 32439 - DNA, 21 bp, Homo sapiens
gctctgaatgyttgctactgt

SEQ ID NO: 32440 - DNA, 21 bp, Homo sapiens
cctgtgcaaaygttcatccac

SEQ ID NO: 32441 - DNA, 21 bp, Homo sapiens
ttgcacactcrtctgtggaca

SEQ ID NO: 32442 - DNA, 21 bp, Homo sapiens
aaagaacagckgtggaaactt

SEQ ID NO: 32443 - DNA, 21 bp, Homo sapiens
cagaagacccytaaagtactg

SEQ ID NO: 32444 - DNA, 21 bp, Homo sapiens
actttacatgytcaagatgtt

SEQ ID NO: 32445 - DNA, 21 bp, Homo sapiens
tatttctgagmccaaaaaaag

SEQ ID NO: 32446 - DNA, 21 bp, Homo sapiens
ggaagatgctsaagtactgca

SEQ ID NO: 32447 - DNA, 21 bp, Homo sapiens
cgtattttcasagtcctttac

SEQ ID NO: 32448 - DNA, 21 bp, Homo sapiens
acgtataaggrctcctaatga

SEQ ID NO: 32449 - DNA, 21 bp, Homo sapiens
caagaagttayaaatggctaa

SEQ ID NO: 32450 - DNA, 21 bp, Homo sapiens
ttttcacctgsaataattttc

SEQ ID NO: 32451 - DNA, 21 bp, Homo sapiens
ctatagacacygtcctgttgc

SEQ ID NO: 32452 - DNA, 21 bp, Homo sapiens
tccatcatacrtgtgggtgtg

SEQ ID NO: 32453 - DNA, 21 bp, Homo sapiens
atcccagggcytcaccttcct

SEQ ID NO: 32454 - DNA, 21 bp, Homo sapiens
agcatcactcrtctgcctcca

SEQ ID NO: 32455 - DNA, 21 bp, Homo sapiens
caggctggcgsgataaagtgc

SEQ ID NO: 32456 - DNA, 21 bp, Homo sapiens
aattcaggagscttctacctt

SEQ ID NO: 32457 - DNA, 21 bp, Homo sapiens
atggcaaggcygtgacatata

SEQ ID NO: 32458 - DNA, 21 bp, Homo sapiens
agaatcagccrtctccataac

SEQ ID NO: 32459 - DNA, 21 bp, Homo sapiens
ttccagctctygttcacacaa

SEQ ID NO: 32460 - DNA, 21 bp, Homo sapiens
gactgcctggscatgtcccct

SEQ ID NO: 32461 - DNA, 21 bp, Homo sapiens
atctgacagcygggagcgggg

SEQ ID NO: 32462 - DNA, 21 bp, Homo sapiens
taaaaaattcytaagctggct

SEQ ID NO: 32463 - DNA, 21 bp, Homo sapiens
gttgttgtgcmtccaatacca

SEQ ID NO: 32464 - DNA, 21 bp, Homo sapiens
caacctccacrctgtgcttgt

SEQ ID NO: 32465 - DNA, 21 bp, Homo sapiens
ccattcttagyttaccaaagt

SEQ ID NO: 32466 - DNA, 21 bp, Homo sapiens
ctaccatgcawactgtaaaca

SEQ ID NO: 32467 - DNA, 21 bp, Homo sapiens
ggtattgcctrcagacccaat

SEQ ID NO: 32468 - DNA, 21 bp, Homo sapiens
tgcttacctcrttgacgtata

SEQ ID NO: 32469 - DNA, 21 bp, Homo sapiens
aataagcattsaggcatctca

SEQ ID NO: 32470 - DNA, 21 bp, Homo sapiens
caaaaggatayaaacttctgg

SEQ ID NO: 32471 - DNA, 21 bp, Homo sapiens
gtctttttttrtagtattttt

SEQ ID NO: 32472 - DNA, 21 bp, Homo sapiens
cacatatcacmaatcattttc

SEQ ID NO: 32473 - DNA, 21 bp, Homo sapiens
gcctcaaattrtctgactcca

SEQ ID NO: 32474 - DNA, 21 bp, Homo sapiens
gatgatggatyggaaaatgcc

SEQ ID NO: 32475 - DNA, 21 bp, Homo sapiens
aaaactgtaaraacagctttc

SEQ ID NO: 32476 - DNA, 21 bp, Homo sapiens
gttgctaaaaygtgggaagat

SEQ ID NO: 32477 - DNA, 21 bp, Homo sapiens
ggaatcttctrctactccaaa

SEQ ID NO: 32478 - DNA, 21 bp, Homo sapiens
tttgccgccgyggatccgctt

SEQ ID NO: 32479 - DNA, 21 bp, Homo sapiens
atttcttttcrtagagcagtt

SEQ ID NO: 32480 - DNA, 21 bp, Homo sapiens
attggagattyatagagtaaa

SEQ ID NO: 32481 - DNA, 21 bp, Homo sapiens
aattaaatgasagaaatatat

SEQ ID NO: 32482 - DNA, 21 bp, Homo sapiens
attgcctctayaaaaaaggaa

SEQ ID NO: 32483 - DNA, 21 bp, Homo sapiens
attgcaggatktttggccaaa

SEQ ID NO: 32484 - DNA, 21 bp, Homo sapiens
tgcacactgcygtgttgaagt

SEQ ID NO: 32485 - DNA, 21 bp, Homo sapiens
gtctgcacttrttgggccaat

SEQ ID NO: 32486 - DNA, 21 bp, Homo sapiens
atttcccatcratgcccatca

SEQ ID NO: 32487 - DNA, 21 bp, Homo sapiens
aacagggaagsgctcagctgg

SEQ ID NO: 32488 - DNA, 21 bp, Homo sapiens
ggccagctttyaggaactttt

SEQ ID NO: 32489 - DNA, 21 bp, Homo sapiens
tagttaataarcatctaaaaa

SEQ ID NO: 32490 - DNA, 21 bp, Homo sapiens
aggatgcatcsgtgaagcgtg

SEQ ID NO: 32491 - DNA, 21 bp, Homo sapiens
ctgaccttcaycaagagcgcc

SEQ ID NO: 32492 - DNA, 21 bp, Homo sapiens
tttcgagtacratccagagaa

SEQ ID NO: 32493 - DNA, 21 bp, Homo sapiens
cagttacttgrgaaatgtttg

SEQ ID NO: 32494 - DNA, 21 bp, Homo sapiens
tgctgctgtcraaaagtcttc

SEQ ID NO: 32495 - DNA, 21 bp, Homo sapiens
aagggaacaayactctgaatt

SEQ ID NO: 32496 - DNA, 21 bp, Homo sapiens
ccattgtgcayggccttgagt

SEQ ID NO: 32497 - DNA, 21 bp, Homo sapiens
actgactttgygctttttagg

SEQ ID NO: 32498 - DNA, 21 bp, Homo sapiens
tcttggggtgmgaaaggagat

SEQ ID NO: 32499 - DNA, 21 bp, Homo sapiens
tgatccacctyggttttctgt

SEQ ID NO: 32500 - DNA, 21 bp, Homo sapiens
cttctgaaaamataaaattag

SEQ ID NO: 32501 - DNA, 21 bp, Homo sapiens
atagaagaaasgggtgtgaat

SEQ ID NO: 32502 - DNA, 21 bp, Homo sapiens
acctatggctytctaatgtct

SEQ ID NO: 32503 - DNA, 21 bp, Homo sapiens
gggatataacygtacataatt

SEQ ID NO: 32504 - DNA, 21 bp, Homo sapiens
tttcatttccktggtgctcta

SEQ ID NO: 32505 - DNA, 21 bp, Homo sapiens
ggaaaccattwgtgacctgta

SEQ ID NO: 32506 - DNA, 21 bp, Homo sapiens
ctggtataagktccctgaatt

SEQ ID NO: 32507 - DNA, 21 bp, Homo sapiens
aaaaatgcttyagttaaaaga

SEQ ID NO: 32508 - DNA, 21 bp, Homo sapiens
ctagggagacygagcaaagca

SEQ ID NO: 32509 - DNA, 21 bp, Homo sapiens
ctgggacccasaagacctgga

SEQ ID NO: 32510 - DNA, 21 bp, Homo sapiens
ctgctcctaamctctgaaata

SEQ ID NO: 32511 - DNA, 21 bp, Homo sapiens
atactgcaccytaccctactg

SEQ ID NO: 32512 - DNA, 21 bp, Homo sapiens
gagaagaagtyggggccaggt

SEQ ID NO: 32513 - DNA, 21 bp, Homo sapiens
atgggaaatcratgagacttg

SEQ ID NO: 32514 - DNA, 21 bp, Homo sapiens
gagatggtaayatttgggagt

SEQ ID NO: 32515 - DNA, 21 bp, Homo sapiens
tctaaaatackttccagaaag

SEQ ID NO: 32516 - DNA, 21 bp, Homo sapiens
catgccaagcmccgtgataag

SEQ ID NO: 32517 - DNA, 21 bp, Homo sapiens
cttaacatccrtagaacaaag

SEQ ID NO: 32518 - DNA, 21 bp, Homo sapiens
gtcattccaawttcaccaaag

SEQ ID NO: 32519 - DNA, 21 bp, Homo sapiens
gaaaaagagtrtttaaaggca

SEQ ID NO: 32520 - DNA, 21 bp, Homo sapiens
gatgtggccartgtgaaccgg

SEQ ID NO: 32521 - DNA, 21 bp, Homo sapiens
acacagttgtraagtggcaaa

SEQ ID NO: 32522 - DNA, 21 bp, Homo sapiens
acaggcccggraacccctagt

SEQ ID NO: 32523 - DNA, 21 bp, Homo sapiens
aaattcttggkaaaacacagc

SEQ ID NO: 32524 - DNA, 21 bp, Homo sapiens
tgggttcttaygaataaaatt

SEQ ID NO: 32525 - DNA, 21 bp, Homo sapiens
taatagagaarctaggcatta

SEQ ID NO: 32526 - DNA, 21 bp, Homo sapiens
ggattttttcygattcaaaat

SEQ ID NO: 32527 - DNA, 21 bp, Homo sapiens
ttttgtagttkataacatatt

SEQ ID NO: 32528 - DNA, 21 bp, Homo sapiens
tacatttctayttaaactcaa

SEQ ID NO: 32529 - DNA, 21 bp, Homo sapiens
gaaaatagggytctgcggtca

SEQ ID NO: 32530 - DNA, 21 bp, Homo sapiens
attgaataccwaatacctgta

SEQ ID NO: 32531 - DNA, 21 bp, Homo sapiens
aacgagtcccmaactataatt

SEQ ID NO: 32532 - DNA, 21 bp, Homo sapiens
ctttccttgtwtaacagtaga

SEQ ID NO: 32533 - DNA, 21 bp, Homo sapiens
aactcaataamtattagcagc

SEQ ID NO: 32534 - DNA, 21 bp, Homo sapiens
tcctggctctrcatactagtt

SEQ ID NO: 32535 - DNA, 21 bp, Homo sapiens
gaacttcaatrctaaatgatt

SEQ ID NO: 32536 - DNA, 21 bp, Homo sapiens
aatgggtaatkcgttaatgtc

SEQ ID NO: 32537 - DNA, 21 bp, Homo sapiens
taagaatttcyacatttgact

SEQ ID NO: 32538 - DNA, 21 bp, Homo sapiens
aaagttcagtmaagtgtatgt

SEQ ID NO: 32539 - DNA, 21 bp, Homo sapiens
acagaatataygactttttac

SEQ ID NO: 32540 - DNA, 21 bp, Homo sapiens
gacactaatgrcatataaaat

SEQ ID NO: 32541 - DNA, 21 bp, Homo sapiens
agcaggctccyaggcgatgcg

SEQ ID NO: 32542 - DNA, 21 bp, Homo sapiens
gtctatagatkagtttttcac

SEQ ID NO: 32543 - DNA, 21 bp, Homo sapiens
gataattctgkacctacactt

SEQ ID NO: 32544 - DNA, 21 bp, Homo sapiens
gaaatgacacrtggctaaccc

SEQ ID NO: 32545 - DNA, 21 bp, Homo sapiens
aattttcttarcatattttta

SEQ ID NO: 32546 - DNA, 21 bp, Homo sapiens
actgtaataaygaatagaaat

SEQ ID NO: 32547 - DNA, 21 bp, Homo sapiens
acctctgaatkactttataaa

SEQ ID NO: 32548 - DNA, 21 bp, Homo sapiens
atgaaactttytagtagtaag

SEQ ID NO: 32549 - DNA, 21 bp, Homo sapiens
tctttccacaraataaataaa

SEQ ID NO: 32550 - DNA, 21 bp, Homo sapiens
tccttatttawgcatcgaagt

SEQ ID NO: 32551 - DNA, 21 bp, Homo sapiens
caggaggaccyctgaattaga

SEQ ID NO: 32552 - DNA, 21 bp, Homo sapiens
tcatttggagygggtcaggag

SEQ ID NO: 32553 - DNA, 21 bp, Homo sapiens
atcccagaggkcccagcaagc

SEQ ID NO: 32554 - DNA, 21 bp, Homo sapiens
ctctctttcamcatgggctaa

SEQ ID NO: 32555 - DNA, 21 bp, Homo sapiens
tcaggtctcgyttcctgcaat

SEQ ID NO: 32556 - DNA, 21 bp, Homo sapiens
tccatccttcyggaggcttcc

SEQ ID NO: 32557 - DNA, 21 bp, Homo sapiens
gtaatcaatgyacgcgcacac

SEQ ID NO: 32558 - DNA, 21 bp, Homo sapiens
tagtgcgaagrgacatgccag

SEQ ID NO: 32559 - DNA, 21 bp, Homo sapiens
ttaaaacgccyctgtgagact

SEQ ID NO: 32560 - DNA, 21 bp, Homo sapiens
aaactacaggmtaacccagaa

SEQ ID NO: 32561 - DNA, 21 bp, Homo sapiens
acggacagacrtaatacttgc

SEQ ID NO: 32562 - DNA, 21 bp, Homo sapiens
ggacaaaataycaagtggaaa

SEQ ID NO: 32563 - DNA, 21 bp, Homo sapiens
ggattcggctytgttgcctta

SEQ ID NO: 32564 - DNA, 21 bp, Homo sapiens
agcatgagtcmgaactggagc

SEQ ID NO: 32565 - DNA, 21 bp, Homo sapiens
ctctcaaatastgaaattgtg

SEQ ID NO: 32566 - DNA, 21 bp, Homo sapiens
tgcttaactcytacctgcctc

SEQ ID NO: 32567 - DNA, 21 bp, Homo sapiens
gttctacttgyttatcttagc

SEQ ID NO: 32568 - DNA, 21 bp, Homo sapiens
ccttccacacrcaaagggtaa

SEQ ID NO: 32569 - DNA, 21 bp, Homo sapiens
tcggcaccacrctgcccaccg

SEQ ID NO: 32570 - DNA, 21 bp, Homo sapiens
atgaaactttytcctgacagt

SEQ ID NO: 32571 - DNA, 21 bp, Homo sapiens
gatccagcacrttacaattgt

SEQ ID NO: 32572 - DNA, 21 bp, Homo sapiens
gtcgttcgtgstcagggaagg

SEQ ID NO: 32573 - DNA, 21 bp, Homo sapiens
ttggggaaacrattgcaatag

SEQ ID NO: 32574 - DNA, 21 bp, Homo sapiens
ttcctgggtgytcataatgga

SEQ ID NO: 32575 - DNA, 21 bp, Homo sapiens
aatgaatgagyagtagttact

SEQ ID NO: 32576 - DNA, 21 bp, Homo sapiens
gcacggagccrcaccacattt

SEQ ID NO: 32577 - DNA, 21 bp, Homo sapiens
atccaccaggyacccaaacca

SEQ ID NO: 32578 - DNA, 21 bp, Homo sapiens
agcccatggtkcatccaactt

SEQ ID NO: 32579 - DNA, 21 bp, Homo sapiens
aacatatatakagagaaactg

SEQ ID NO: 32580 - DNA, 21 bp, Homo sapiens
gcattcaaccrttgaaccctc

SEQ ID NO: 32581 - DNA, 21 bp, Homo sapiens
gatatgacacytggacccaga

SEQ ID NO: 32582 - DNA, 21 bp, Homo sapiens
ccgttggcagycgctggccac

SEQ ID NO: 32583 - DNA, 21 bp, Homo sapiens
ccaggagagtrtgagccagaa

SEQ ID NO: 32584 - DNA, 21 bp, Homo sapiens
ccatcatgccraacctgggga

SEQ ID NO: 32585 - DNA, 21 bp, Homo sapiens
agctctctccrccttaatctc

SEQ ID NO: 32586 - DNA, 21 bp, Homo sapiens
catcctgcaayaggcacgtca

SEQ ID NO: 32587 - DNA, 21 bp, Homo sapiens
aacatgcatcrgcacgctccc

SEQ ID NO: 32588 - DNA, 21 bp, Homo sapiens
tagcaatcccrggccatgtct

SEQ ID NO: 32589 - DNA, 21 bp, Homo sapiens
ctcttcaccaygtaacgtacc

SEQ ID NO: 32590 - DNA, 21 bp, Homo sapiens
cctcaggagcyaggaaaactc

SEQ ID NO: 32591 - DNA, 21 bp, Homo sapiens
cactagtctayaagctctctc

SEQ ID NO: 32592 - DNA, 21 bp, Homo sapiens
agggcctggcrtctgagttca

SEQ ID NO: 32593 - DNA, 21 bp, Homo sapiens
agtcagtcatytggggtctgg

SEQ ID NO: 32594 - DNA, 21 bp, Homo sapiens
cttacttgatytctgccccct

SEQ ID NO: 32595 - DNA, 21 bp, Homo sapiens
atattacagcraatggattac

SEQ ID NO: 32596 - DNA, 21 bp, Homo sapiens
gcaaatcactrtcctgcactg

SEQ ID NO: 32597 - DNA, 21 bp, Homo sapiens
gtgacactgamtggaaacatg

SEQ ID NO: 32598 - DNA, 21 bp, Homo sapiens
tatggagccayatactctatt

SEQ ID NO: 32599 - DNA, 21 bp, Homo sapiens
ggagtcttcamgttcagctgg

SEQ ID NO: 32600 - DNA, 21 bp, Homo sapiens
cctctgcatarataattaatt

SEQ ID NO: 32601 - DNA, 21 bp, Homo sapiens
ctgaggcaagygtgtttctac

SEQ ID NO: 32602 - DNA, 21 bp, Homo sapiens
ccccagacgckggaaaaccaa

SEQ ID NO: 32603 - DNA, 21 bp, Homo sapiens
ttgactctccrtcagaacagc

SEQ ID NO: 32604 - DNA, 21 bp, Homo sapiens
agaaatggagrtgccattgaa

SEQ ID NO: 32605 - DNA, 21 bp, Homo sapiens
acacaagcagrtacagataaa

SEQ ID NO: 32606 - DNA, 21 bp, Homo sapiens
tcctctgcctrccacatatcc

SEQ ID NO: 32607 - DNA, 21 bp, Homo sapiens
taatatgccaytatcaaagga

SEQ ID NO: 32608 - DNA, 21 bp, Homo sapiens
atactggaagsgtttaggagg

SEQ ID NO: 32609 - DNA, 21 bp, Homo sapiens
agaaggatgamgcctaactct

SEQ ID NO: 32610 - DNA, 21 bp, Homo sapiens
ctacctaggaraccagactac

SEQ ID NO: 32611 - DNA, 21 bp, Homo sapiens
caagtgaaacmcaacccccaa

SEQ ID NO: 32612 - DNA, 21 bp, Homo sapiens
ataaattcaargcagtagaga

SEQ ID NO: 32613 - DNA, 21 bp, Homo sapiens
gacagtaaacygtatttggga

SEQ ID NO: 32614 - DNA, 21 bp, Homo sapiens
gatctcaggcragcagggagt

SEQ ID NO: 32615 - DNA, 21 bp, Homo sapiens
ttaggtctcasgtcatgagaa

SEQ ID NO: 32616 - DNA, 21 bp, Homo sapiens
agaaagtttcytcaataagcc

SEQ ID NO: 32617 - DNA, 21 bp, Homo sapiens
ttttagcttaygttcgtctca

SEQ ID NO: 32618 - DNA, 21 bp, Homo sapiens
ccgaaatcccygactgctttt

SEQ ID NO: 32619 - DNA, 21 bp, Homo sapiens
aatgcatgcasatagtacaaa

SEQ ID NO: 32620 - DNA, 21 bp, Homo sapiens
aaaggtcaaawggcaaaacta

SEQ ID NO: 32621 - DNA, 21 bp, Homo sapiens
ctgggtcattsttggaaaata

SEQ ID NO: 32622 - DNA, 21 bp, Homo sapiens
aacacagctcygtatctatct

SEQ ID NO: 32623 - DNA, 21 bp, Homo sapiens
tggtagaaacscagggcactg

SEQ ID NO: 32624 - DNA, 21 bp, Homo sapiens
gccaccaggayaagcaaacaa

SEQ ID NO: 32625 - DNA, 21 bp, Homo sapiens
ctcttccatgsgctggttcgt

SEQ ID NO: 32626 - DNA, 21 bp, Homo sapiens
atggaccttawgcccctcctt

SEQ ID NO: 32627 - DNA, 21 bp, Homo sapiens
ccccagataakgaagatttta

SEQ ID NO: 32628 - DNA, 21 bp, Homo sapiens
aactcttactrttagaaaata

SEQ ID NO: 32629 - DNA, 21 bp, Homo sapiens
ctctttaaagyggttcaacta

SEQ ID NO: 32630 - DNA, 21 bp, Homo sapiens
ctactctggayttaacagcag

SEQ ID NO: 32631 - DNA, 21 bp, Homo sapiens
gttttataagyaacgaatcac

SEQ ID NO: 32632 - DNA, 21 bp, Homo sapiens
ttaattttgcmtgaagatcaa

SEQ ID NO: 32633 - DNA, 21 bp, Homo sapiens
tcaaatgtggwaaccatatca

SEQ ID NO: 32634 - DNA, 21 bp, Homo sapiens
ctaatctttcractctgtaga

SEQ ID NO: 32635 - DNA, 21 bp, Homo sapiens
aggggttaacwgagtcaggca

SEQ ID NO: 32636 - DNA, 21 bp, Homo sapiens
cacaccaccarttcccttata

SEQ ID NO: 32637 - DNA, 21 bp, Homo sapiens
ttgagattggsatggtataaa

SEQ ID NO: 32638 - DNA, 21 bp, Homo sapiens
tgatgctatartagctcttct

SEQ ID NO: 32639 - DNA, 21 bp, Homo sapiens
aaatatgggakttccaggcat

SEQ ID NO: 32640 - DNA, 21 bp, Homo sapiens
agctgtgttaygaacagaggc

SEQ ID NO: 32641 - DNA, 21 bp, Homo sapiens
ccgctaaattyacccaggtga

SEQ ID NO: 32642 - DNA, 21 bp, Homo sapiens
tgtgcaaaaamctttgagtga

SEQ ID NO: 32643 - DNA, 21 bp, Homo sapiens
gttatggcacygatatagttc

SEQ ID NO: 32644 - DNA, 21 bp, Homo sapiens
gagaaatactrgatagacacc

SEQ ID NO: 32645 - DNA, 21 bp, Homo sapiens
tatttctcctsagtaaacaag

SEQ ID NO: 32646 - DNA, 21 bp, Homo sapiens
acattcagagkacatttttga

SEQ ID NO: 32647 - DNA, 21 bp, Homo sapiens
ttgccaactamaagtttccta

SEQ ID NO: 32648 - DNA, 21 bp, Homo sapiens
tattttggggrctataccctg

SEQ ID NO: 32649 - DNA, 21 bp, Homo sapiens
gcagaactccrgttattgcac

SEQ ID NO: 32650 - DNA, 21 bp, Homo sapiens
gttatttcaayttcaaataaa

SEQ ID NO: 32651 - DNA, 21 bp, Homo sapiens
aagactcaggmtccttcaggt

SEQ ID NO: 32652 - DNA, 21 bp, Homo sapiens
tggtatcctgmcctcgtgatc

SEQ ID NO: 32653 - DNA, 21 bp, Homo sapiens
tctgtagattrattgggtggt

SEQ ID NO: 32654 - DNA, 21 bp, Homo sapiens
aaaggtcccaracaggaaacc

SEQ ID NO: 32655 - DNA, 21 bp, Homo sapiens
gtttcttccartctgtcattt

SEQ ID NO: 32656 - DNA, 21 bp, Homo sapiens
gggcggtcagrgaggtcttat

SEQ ID NO: 32657 - DNA, 21 bp, Homo sapiens
ttcagagctaytgctgtgtct

SEQ ID NO: 32658 - DNA, 21 bp, Homo sapiens
gggtttgtagrtgatacattt

SEQ ID NO: 32659 - DNA, 21 bp, Homo sapiens
ttggtgtacckgttggtcttt

SEQ ID NO: 32660 - DNA, 21 bp, Homo sapiens
taatatcacaragagatgttc

SEQ ID NO: 32661 - DNA, 21 bp, Homo sapiens
cattcctgatygtgcagtaac

SEQ ID NO: 32662 - DNA, 21 bp, Homo sapiens
tcatcaagacyattatttatc

SEQ ID NO: 32663 - DNA, 21 bp, Homo sapiens
ggggctcaaaraaacaaaatg

SEQ ID NO: 32664 - DNA, 21 bp, Homo sapiens
tgaaaaggttygaatgattaa

SEQ ID NO: 32665 - DNA, 21 bp, Homo sapiens
gactgctgtgkccagagcctg

SEQ ID NO: 32666 - DNA, 21 bp, Homo sapiens
gaggcccttascaccttccca

SEQ ID NO: 32667 - DNA, 21 bp, Homo sapiens
tgtttacttcyaagctccttt

SEQ ID NO: 32668 - DNA, 21 bp, Homo sapiens
tctgtcgggcragcatttgga

SEQ ID NO: 32669 - DNA, 21 bp, Homo sapiens
taggtttagtractttagagt

SEQ ID NO: 32670 - DNA, 21 bp, Homo sapiens
aacatgctgcygtcctagaag

SEQ ID NO: 32671 - DNA, 21 bp, Homo sapiens
gcaggcaccarattctattca

SEQ ID NO: 32672 - DNA, 21 bp, Homo sapiens
tctagatcacygtatgaggcg

SEQ ID NO: 32673 - DNA, 21 bp, Homo sapiens
gaaaggcgttsatttttgagg

SEQ ID NO: 32674 - DNA, 21 bp, Homo sapiens
attagatcacygatgctcact

SEQ ID NO: 32675 - DNA, 21 bp, Homo sapiens
gctgaccaccrgcgggatggc

SEQ ID NO: 32676 - DNA, 21 bp, Homo sapiens
atgctgcttaycttataggac

SEQ ID NO: 32677 - DNA, 21 bp, Homo sapiens
gttttacaaayagtgctaaaa

SEQ ID NO: 32678 - DNA, 21 bp, Homo sapiens
cttggaaactygtggctcctt

SEQ ID NO: 32679 - DNA, 21 bp, Homo sapiens
aaatccaaccwgttctttgag

SEQ ID NO: 32680 - DNA, 21 bp, Homo sapiens
agcttaagggratgggcgtcc

SEQ ID NO: 32681 - DNA, 21 bp, Homo sapiens
agactgacagstttgggttga

SEQ ID NO: 32682 - DNA, 21 bp, Homo sapiens
taactggactrtttatagttg

SEQ ID NO: 32683 - DNA, 21 bp, Homo sapiens
attatataatyttaatacata

SEQ ID NO: 32684 - DNA, 21 bp, Homo sapiens
tatctgattaraccacttgat

SEQ ID NO: 32685 - DNA, 21 bp, Homo sapiens
ggggacttgtrttgggcctcg

SEQ ID NO: 32686 - DNA, 21 bp, Homo sapiens
tttggctccaraaaatactcc

SEQ ID NO: 32687 - DNA, 21 bp, Homo sapiens
caaatctacaytctaaaatcc

SEQ ID NO: 32688 - DNA, 21 bp, Homo sapiens
tcaattgctaygatgttatac

SEQ ID NO: 32689 - DNA, 21 bp, Homo sapiens
tgcattagtcrgatatctttg

SEQ ID NO: 32690 - DNA, 21 bp, Homo sapiens
aaaaatgtaaytcctcgttca

SEQ ID NO: 32691 - DNA, 21 bp, Homo sapiens
aataagtattrtttaatgaag

SEQ ID NO: 32692 - DNA, 21 bp, Homo sapiens
tctgttctttscttgtggata

SEQ ID NO: 32693 - DNA, 21 bp, Homo sapiens
aactgggaaaygacatacaaa

SEQ ID NO: 32694 - DNA, 21 bp, Homo sapiens
caatcttagamgccatgcctc

SEQ ID NO: 32695 - DNA, 21 bp, Homo sapiens
aactgaaattygcatattatt

SEQ ID NO: 32696 - DNA, 21 bp, Homo sapiens
tccaatcaatyatttatgctt

SEQ ID NO: 32697 - DNA, 21 bp, Homo sapiens
agatgacaaartgctgattat

SEQ ID NO: 32698 - DNA, 21 bp, Homo sapiens
agccttcagaygcactcagac

SEQ ID NO: 32699 - DNA, 21 bp, Homo sapiens
gtttcctgagsaccagacacg

SEQ ID NO: 32700 - DNA, 21 bp, Homo sapiens
ttgacgatacraatatagaat

SEQ ID NO: 32701 - DNA, 21 bp, Homo sapiens
acaaaggaatyatgagagagg

SEQ ID NO: 32702 - DNA, 21 bp, Homo sapiens
cactccaccasgatctgtaca

SEQ ID NO: 32703 - DNA, 21 bp, Homo sapiens
cataaaggaakatcccagtac

SEQ ID NO: 32704 - DNA, 21 bp, Homo sapiens
aaccctatatygtcatccaga

SEQ ID NO: 32705 - DNA, 21 bp, Homo sapiens
ttgcttgttgyacacagtgtt

SEQ ID NO: 32706 - DNA, 21 bp, Homo sapiens
tccatgtttcrtcgtgccaat

SEQ ID NO: 32707 - DNA, 21 bp, Homo sapiens
atgtgttccarcagggtgctt

SEQ ID NO: 32708 - DNA, 21 bp, Homo sapiens
cttgcttttgrtgagtgtctt

SEQ ID NO: 32709 - DNA, 21 bp, Homo sapiens
acaaccggcgrtatggagtgt

SEQ ID NO: 32710 - DNA, 21 bp, Homo sapiens
gaacttattaratggaaactg

SEQ ID NO: 32711 - DNA, 21 bp, Homo sapiens
tatgtagatgytacagtgggg

SEQ ID NO: 32712 - DNA, 21 bp, Homo sapiens
cactctctgayttccaacccc

SEQ ID NO: 32713 - DNA, 21 bp, Homo sapiens
gaacccccccmaaaaaagaat

SEQ ID NO: 32714 - DNA, 21 bp, Homo sapiens
gccattcacarcaacacttct

SEQ ID NO: 32715 - DNA, 21 bp, Homo sapiens
ggggcagaggygtcattgagg

SEQ ID NO: 32716 - DNA, 21 bp, Homo sapiens
ttaaaggtgamcctggtatat

SEQ ID NO: 32717 - DNA, 21 bp, Homo sapiens
atgagaggaamgaggaccatg

SEQ ID NO: 32718 - DNA, 21 bp, Homo sapiens
tcattagcaayctgacaactt

SEQ ID NO: 32719 - DNA, 21 bp, Homo sapiens
tacagtgataycttcagagct

SEQ ID NO: 32720 - DNA, 21 bp, Homo sapiens
actcaggagtkcatttatttt

SEQ ID NO: 32721 - DNA, 21 bp, Homo sapiens
gcagttcagaytttgcttttt

SEQ ID NO: 32722 - DNA, 21 bp, Homo sapiens
cctggtgaaaygccaggcttc

SEQ ID NO: 32723 - DNA, 21 bp, Homo sapiens
ctctactcagktaatgtggat

SEQ ID NO: 32724 - DNA, 21 bp, Homo sapiens
cagggggtccrtgaacaagag

SEQ ID NO: 32725 - DNA, 21 bp, Homo sapiens
ctatctcttawatatcacaat

SEQ ID NO: 32726 - DNA, 21 bp, Homo sapiens
ataaagtgatytcaaaggcag

SEQ ID NO: 32727 - DNA, 21 bp, Homo sapiens
atccactcttsctttttgtct

SEQ ID NO: 32728 - DNA, 21 bp, Homo sapiens
ttcttgaagtwcctcatttaa

SEQ ID NO: 32729 - DNA, 21 bp, Homo sapiens
tggcaatgttrtatggattag

SEQ ID NO: 32730 - DNA, 21 bp, Homo sapiens
attttcggctragtgatatca

SEQ ID NO: 32731 - DNA, 21 bp, Homo sapiens
aaacaggtcayactatcagat

SEQ ID NO: 32732 - DNA, 21 bp, Homo sapiens
gtcacctaacrgtctccagaa

SEQ ID NO: 32733 - DNA, 21 bp, Homo sapiens
gatgtatttaytagtggttaa

SEQ ID NO: 32734 - DNA, 21 bp, Homo sapiens
gattacattaygggtcaaaga

SEQ ID NO: 32735 - DNA, 21 bp, Homo sapiens
tccttgaattstagcttctga

SEQ ID NO: 32736 - DNA, 21 bp, Homo sapiens
tcctgacagarccctcagaag

SEQ ID NO: 32737 - DNA, 21 bp, Homo sapiens
ggctctggctytcccatgcca

SEQ ID NO: 32738 - DNA, 21 bp, Homo sapiens
ttagaattaaycctcgagttc

SEQ ID NO: 32739 - DNA, 21 bp, Homo sapiens
tattgcccttyggtccctgtg

SEQ ID NO: 32740 - DNA, 21 bp, Homo sapiens
tcagagcctaraaacaattgg

SEQ ID NO: 32741 - DNA, 21 bp, Homo sapiens
gttctactctrgtaagctacc

SEQ ID NO: 32742 - DNA, 21 bp, Homo sapiens
tgtatacccaytttcaagtct

SEQ ID NO: 32743 - DNA, 21 bp, Homo sapiens
tacatatgatyttcactgcac

SEQ ID NO: 32744 - DNA, 21 bp, Homo sapiens
atccacgtgtrctatgatgaa

SEQ ID NO: 32745 - DNA, 21 bp, Homo sapiens
taataggaagrttaatctagc

SEQ ID NO: 32746 - DNA, 21 bp, Homo sapiens
tgccaagaagwtttgagcagt

SEQ ID NO: 32747 - DNA, 21 bp, Homo sapiens
gagcagctggyaaaagtgaca

SEQ ID NO: 32748 - DNA, 21 bp, Homo sapiens
gattttcctawtctctcagtg

SEQ ID NO: 32749 - DNA, 21 bp, Homo sapiens
acttgcaccayggttagaatt

SEQ ID NO: 32750 - DNA, 21 bp, Homo sapiens
ttcttggccaygagttcttca

SEQ ID NO: 32751 - DNA, 21 bp, Homo sapiens
atataaagagygatactgttg

SEQ ID NO: 32752 - DNA, 21 bp, Homo sapiens
ctggttgttgytcctccagta

SEQ ID NO: 32753 - DNA, 21 bp, Homo sapiens
tcttgggtcamccaaactggc

SEQ ID NO: 32754 - DNA, 21 bp, Homo sapiens
actgttttctrtcagagacac

SEQ ID NO: 32755 - DNA, 21 bp, Homo sapiens
caagacattgstccagaagct

SEQ ID NO: 32756 - DNA, 21 bp, Homo sapiens
gcatctttacrcattgaactc

SEQ ID NO: 32757 - DNA, 21 bp, Homo sapiens
tcagaagggarggtccaggta

SEQ ID NO: 32758 - DNA, 21 bp, Homo sapiens
ggtatgaagtygtacccataa

SEQ ID NO: 32759 - DNA, 21 bp, Homo sapiens
tggcagcagcytagtgctttc

SEQ ID NO: 32760 - DNA, 21 bp, Homo sapiens
tttctccccaragcaagagca

SEQ ID NO: 32761 - DNA, 21 bp, Homo sapiens
ctcaaagcccytgtggtagta

SEQ ID NO: 32762 - DNA, 21 bp, Homo sapiens
gctctgttgcygtctctagga

SEQ ID NO: 32763 - DNA, 21 bp, Homo sapiens
ttcttaacaascttcctagtg

SEQ ID NO: 32764 - DNA, 21 bp, Homo sapiens
ttcactccttsaaggtaggga

SEQ ID NO: 32765 - DNA, 21 bp, Homo sapiens
ggaggaggcamgcctgaaaca

SEQ ID NO: 32766 - DNA, 21 bp, Homo sapiens
gtcagcacagkgtcccacctc

SEQ ID NO: 32767 - DNA, 21 bp, Homo sapiens
cacctcctgckgtgtgcctgg

SEQ ID NO: 32768 - DNA, 21 bp, Homo sapiens
tcaattcttgwcaagcttaaa

SEQ ID NO: 32769 - DNA, 21 bp, Homo sapiens
ctgtgtgtggytgggaccagt

SEQ ID NO: 32770 - DNA, 21 bp, Homo sapiens
cagagatgaarctcccctcca

SEQ ID NO: 32771 - DNA, 21 bp, Homo sapiens
ctcttctcatkgggatgtctt

SEQ ID NO: 32772 - DNA, 21 bp, Homo sapiens
gaggctctgcyccatgtctct

SEQ ID NO: 32773 - DNA, 21 bp, Homo sapiens
ctaaattcctrtgtgcatatg

SEQ ID NO: 32774 - DNA, 21 bp, Homo sapiens
tttagattcawatgtggtaga

SEQ ID NO: 32775 - DNA, 21 bp, Homo sapiens
aagatgctcgycgcagttccc

SEQ ID NO: 32776 - DNA, 21 bp, Homo sapiens
agctttgttgwttttaaagtt

SEQ ID NO: 32777 - DNA, 21 bp, Homo sapiens
tgccaagcatrtgtatttttg

SEQ ID NO: 32778 - DNA, 21 bp, Homo sapiens
ccctattcatytggaaatttt

SEQ ID NO: 32779 - DNA, 21 bp, Homo sapiens
cacaaccgttragacttgaat

SEQ ID NO: 32780 - DNA, 21 bp, Homo sapiens
ttctctgtctstgtctctctg

SEQ ID NO: 32781 - DNA, 21 bp, Homo sapiens
aactctagccscgggttggct

SEQ ID NO: 32782 - DNA, 21 bp, Homo sapiens
cgatgtcccaygagggcaggg

SEQ ID NO: 32783 - DNA, 21 bp, Homo sapiens
taatcaggtcrcagggtgaaa

SEQ ID NO: 32784 - DNA, 21 bp, Homo sapiens
gtccccagccyctgtttatct

SEQ ID NO: 32785 - DNA, 21 bp, Homo sapiens
gtaggagcacragcatgtcac

SEQ ID NO: 32786 - DNA, 21 bp, Homo sapiens
cagggtctgtwgtatccaacc

SEQ ID NO: 32787 - DNA, 21 bp, Homo sapiens
tggggggtggscaaggaggct

SEQ ID NO: 32788 - DNA, 21 bp, Homo sapiens
ggctggggtgyagaccgagtg

SEQ ID NO: 32789 - DNA, 21 bp, Homo sapiens
tgacttaaccygtctgagcca

SEQ ID NO: 32790 - DNA, 21 bp, Homo sapiens
ccacagggctrtagggcttga

SEQ ID NO: 32791 - DNA, 21 bp, Homo sapiens
atggaaggcgrgtgcctcagg

SEQ ID NO: 32792 - DNA, 21 bp, Homo sapiens
taggggatctytgccactttg

SEQ ID NO: 32793 - DNA, 21 bp, Homo sapiens
acatggtctcrttttatcatc

SEQ ID NO: 32794 - DNA, 21 bp, Homo sapiens
gtggcgggtcrcagtaagaac

SEQ ID NO: 32795 - DNA, 21 bp, Homo sapiens
ttcattcacaytgggccatct

SEQ ID NO: 32796 - DNA, 21 bp, Homo sapiens
gcagggagaartgccaccttc

SEQ ID NO: 32797 - DNA, 21 bp, Homo sapiens
tcttgtgttcrcaagagacag

SEQ ID NO: 32798 - DNA, 21 bp, Homo sapiens
aactcacaagwtatacttagt

SEQ ID NO: 32799 - DNA, 21 bp, Homo sapiens
gcaagacctaygaatcagtgt

SEQ ID NO: 32800 - DNA, 21 bp, Homo sapiens
ctaggtcattmacagaccctt

SEQ ID NO: 32801 - DNA, 21 bp, Homo sapiens
tttatcttttracttagtctc

SEQ ID NO: 32802 - DNA, 21 bp, Homo sapiens
ggatcctgagmcgctcaccat

SEQ ID NO: 32803 - DNA, 21 bp, Homo sapiens
ttccaccttgycccatccacc

SEQ ID NO: 32804 - DNA, 21 bp, Homo sapiens
agtggagcccmagaatctgca

SEQ ID NO: 32805 - DNA, 21 bp, Homo sapiens
ctcccacttcytctttcttct

SEQ ID NO: 32806 - DNA, 21 bp, Homo sapiens
tcctaaactaygccttcagaa

SEQ ID NO: 32807 - DNA, 21 bp, Homo sapiens
tacctcaccgsggtgggtaag

SEQ ID NO: 32808 - DNA, 21 bp, Homo sapiens
cttgttggcaratctgtttta

SEQ ID NO: 32809 - DNA, 21 bp, Homo sapiens
ctggacacgtycaacctggta

SEQ ID NO: 32810 - DNA, 21 bp, Homo sapiens
ccatcaaacgmgtgatggtac

SEQ ID NO: 32811 - DNA, 21 bp, Homo sapiens
agcgtcccccrcacagcccac

SEQ ID NO: 32812 - DNA, 21 bp, Homo sapiens
ctgcttccgaytctagacagc

SEQ ID NO: 32813 - DNA, 21 bp, Homo sapiens
gtggcccctawgtgctgtctt

SEQ ID NO: 32814 - DNA, 21 bp, Homo sapiens
aggacaatctycccatcccaa

SEQ ID NO: 32815 - DNA, 21 bp, Homo sapiens
ttcctgagtcscttgccctga

SEQ ID NO: 32816 - DNA, 21 bp, Homo sapiens
tctcagaaccytttggagctc

SEQ ID NO: 32817 - DNA, 21 bp, Homo sapiens
tcctgacttgyggttgggacc

SEQ ID NO: 32818 - DNA, 21 bp, Homo sapiens
ttgtgtgtacytgggtcgcag

SEQ ID NO: 32819 - DNA, 21 bp, Homo sapiens
gtatttgaagmcgggtttctc

SEQ ID NO: 32820 - DNA, 21 bp, Homo sapiens
gggatggcctrgaggctgttt

SEQ ID NO: 32821 - DNA, 21 bp, Homo sapiens
ggggcgactgsgcatccctgg

SEQ ID NO: 32822 - DNA, 21 bp, Homo sapiens
agcaccccccsagccctggct

SEQ ID NO: 32823 - DNA, 21 bp, Homo sapiens
caagagatgcrcgtggcgtca

SEQ ID NO: 32824 - DNA, 21 bp, Homo sapiens
agccagggggsagaaatcact

SEQ ID NO: 32825 - DNA, 21 bp, Homo sapiens
aaaagctccayacacaatccc

SEQ ID NO: 32826 - DNA, 21 bp, Homo sapiens
tcgtatttgtrttctaagcat

SEQ ID NO: 32827 - DNA, 21 bp, Homo sapiens
gtgaaaggcaygtgaatacag

SEQ ID NO: 32828 - DNA, 21 bp, Homo sapiens
tgaaggctggrcattttccaa

SEQ ID NO: 32829 - DNA, 21 bp, Homo sapiens
tgaagactgayccatcaagct

SEQ ID NO: 32830 - DNA, 21 bp, Homo sapiens
ttcacccagarggcactttta

SEQ ID NO: 32831 - DNA, 21 bp, Homo sapiens
attttggaaaygtggctgcaa

SEQ ID NO: 32832 - DNA, 21 bp, Homo sapiens
atgtctgcctrttagtttgta

SEQ ID NO: 32833 - DNA, 21 bp, Homo sapiens
tcagagtcagygatctcaacc

SEQ ID NO: 32834 - DNA, 21 bp, Homo sapiens
cacttgtacaygggagtactc

SEQ ID NO: 32835 - DNA, 21 bp, Homo sapiens
aagctcagcaracaagggttt

SEQ ID NO: 32836 - DNA, 21 bp, Homo sapiens
attttattatrtgttaggatc

SEQ ID NO: 32837 - DNA, 21 bp, Homo sapiens
gtggtcttgargtggatacct

SEQ ID NO: 32838 - DNA, 21 bp, Homo sapiens
tggccaatgargcctaaattg

SEQ ID NO: 32839 - DNA, 21 bp, Homo sapiens
tggatgaattrtacagtgatg

SEQ ID NO: 32840 - DNA, 21 bp, Homo sapiens
ccaattatagygaaatggtca

SEQ ID NO: 32841 - DNA, 21 bp, Homo sapiens
gagctcttgarctcatctgat

SEQ ID NO: 32842 - DNA, 21 bp, Homo sapiens
gcctgggcccyggaaattaaa

SEQ ID NO: 32843 - DNA, 21 bp, Homo sapiens
ccttgccaggkttaaggaaag

SEQ ID NO: 32844 - DNA, 21 bp, Homo sapiens
gctcccttccyggaggactgc

SEQ ID NO: 32845 - DNA, 21 bp, Homo sapiens
taagaatgaamttggacctcc

SEQ ID NO: 32846 - DNA, 21 bp, Homo sapiens
tgagacagcayccagggaatg

SEQ ID NO: 32847 - DNA, 21 bp, Homo sapiens
cagggtagccmcagtgctctg

SEQ ID NO: 32848 - DNA, 21 bp, Homo sapiens
agctgactttrccattgagta

SEQ ID NO: 32849 - DNA, 21 bp, Homo sapiens
tggatgggtayaaagatatgg

SEQ ID NO: 32850 - DNA, 21 bp, Homo sapiens
agcaaggaaayggttgggtca

SEQ ID NO: 32851 - DNA, 21 bp, Homo sapiens
gcagccccaaygagccctctg

SEQ ID NO: 32852 - DNA, 21 bp, Homo sapiens
caaagtgtctmctgccattgc

SEQ ID NO: 32853 - DNA, 21 bp, Homo sapiens
gccaactccckccagaggtgc

SEQ ID NO: 32854 - DNA, 21 bp, Homo sapiens
tccatcaggtsggtgagggag

SEQ ID NO: 32855 - DNA, 21 bp, Homo sapiens
tgggggagtcrtggttgaaag

SEQ ID NO: 32856 - DNA, 21 bp, Homo sapiens
cacctgcctcyggtgtgttcc

SEQ ID NO: 32857 - DNA, 21 bp, Homo sapiens
gggacttcaayggaaggtggt

SEQ ID NO: 32858 - DNA, 21 bp, Homo sapiens
ttcatataaaycttggaagta

SEQ ID NO: 32859 - DNA, 21 bp, Homo sapiens
ctcaaatgatraagtcccaat

SEQ ID NO: 32860 - DNA, 21 bp, Homo sapiens
tctaggagagyacagttcaaa

SEQ ID NO: 32861 - DNA, 21 bp, Homo sapiens
catttcttgcwggaagtatgt

SEQ ID NO: 32862 - DNA, 21 bp, Homo sapiens
tgtagctgtcrtcttatttac

SEQ ID NO: 32863 - DNA, 21 bp, Homo sapiens
tttagacaaakaggaagttgt

SEQ ID NO: 32864 - DNA, 21 bp, Homo sapiens
cttcatactgsataaacccaa

SEQ ID NO: 32865 - DNA, 21 bp, Homo sapiens
agatccctaarggagagggaa

SEQ ID NO: 32866 - DNA, 21 bp, Homo sapiens
tccgactgccmagcccttttc

SEQ ID NO: 32867 - DNA, 21 bp, Homo sapiens
cctggccgccrtgctccaggc

SEQ ID NO: 32868 - DNA, 21 bp, Homo sapiens
aggctctgagracagagaggt

SEQ ID NO: 32869 - DNA, 21 bp, Homo sapiens
ctgaggctatrtctccgacct

SEQ ID NO: 32870 - DNA, 21 bp, Homo sapiens
ggaaaagttgyagccagtggg

SEQ ID NO: 32871 - DNA, 21 bp, Homo sapiens
tgattcgattytggttttcac

SEQ ID NO: 32872 - DNA, 21 bp, Homo sapiens
ccttccagccytagtatcata

SEQ ID NO: 32873 - DNA, 21 bp, Homo sapiens
tcttgctggayagaaacagga

SEQ ID NO: 32874 - DNA, 21 bp, Homo sapiens
gaaccagcatrgctggccaga

SEQ ID NO: 32875 - DNA, 21 bp, Homo sapiens
gacctatcacrgaccaaggac

SEQ ID NO: 32876 - DNA, 21 bp, Homo sapiens
gaaggggcctscctggcttcc

SEQ ID NO: 32877 - DNA, 21 bp, Homo sapiens
acatgcaaggsgctatgatca

SEQ ID NO: 32878 - DNA, 21 bp, Homo sapiens
acatcattcgyggtggcagga

SEQ ID NO: 32879 - DNA, 21 bp, Homo sapiens
cttcaggaagygactgtcata

SEQ ID NO: 32880 - DNA, 21 bp, Homo sapiens
atatctgtgartcacattcag

SEQ ID NO: 32881 - DNA, 21 bp, Homo sapiens
gcacagctacrtttgttccat

SEQ ID NO: 32882 - DNA, 21 bp, Homo sapiens
gaccccacacrctttgaaaat

SEQ ID NO: 32883 - DNA, 21 bp, Homo sapiens
taaaaggacaygagggaaatc

SEQ ID NO: 32884 - DNA, 21 bp, Homo sapiens
atgaaaggtgrcaaggtaagg

SEQ ID NO: 32885 - DNA, 21 bp, Homo sapiens
ctgtctttaaytagaatgttg

SEQ ID NO: 32886 - DNA, 21 bp, Homo sapiens
tgccacatccraaagtgtaca

SEQ ID NO: 32887 - DNA, 21 bp, Homo sapiens
tagtaaaaaawtcccttcctt

SEQ ID NO: 32888 - DNA, 21 bp, Homo sapiens
tgcaattacasaaatttttgt

SEQ ID NO: 32889 - DNA, 21 bp, Homo sapiens
gcaggacacgsgattagcata

SEQ ID NO: 32890 - DNA, 21 bp, Homo sapiens
ttttttgactmagcatcaatg

SEQ ID NO: 32891 - DNA, 21 bp, Homo sapiens
cttttcccccmtcagatagga

SEQ ID NO: 32892 - DNA, 21 bp, Homo sapiens
ttctgagtgcyttccagcttg

SEQ ID NO: 32893 - DNA, 21 bp, Homo sapiens
gtgcaagatcragtttgctgt

SEQ ID NO: 32894 - DNA, 21 bp, Homo sapiens
attctcccagragaaacatca

SEQ ID NO: 32895 - DNA, 21 bp, Homo sapiens
gaagctcctgytctgctcccc

SEQ ID NO: 32896 - DNA, 21 bp, Homo sapiens
aatggacagarggaaaaggag

SEQ ID NO: 32897 - DNA, 21 bp, Homo sapiens
ctcatttttayctctatattc

SEQ ID NO: 32898 - DNA, 21 bp, Homo sapiens
ctgcagacccmggcgtctctg

SEQ ID NO: 32899 - DNA, 21 bp, Homo sapiens
ctttgactttyacagaagaga

SEQ ID NO: 32900 - DNA, 21 bp, Homo sapiens
atgtatcaagkatgatcaagg

SEQ ID NO: 32901 - DNA, 21 bp, Homo sapiens
ttttcagtaayaggaaaacat

SEQ ID NO: 32902 - DNA, 21 bp, Homo sapiens
gacatttggaraaaaaggtgc

SEQ ID NO: 32903 - DNA, 21 bp, Homo sapiens
taaacactgtyaacaattcta

SEQ ID NO: 32904 - DNA, 21 bp, Homo sapiens
atggggcaaaracagaggaat

SEQ ID NO: 32905 - DNA, 21 bp, Homo sapiens
ggatctttcakcagtgcttta

SEQ ID NO: 32906 - DNA, 21 bp, Homo sapiens
tatgacaggtragttacatct

SEQ ID NO: 32907 - DNA, 21 bp, Homo sapiens
tcctttcaacraattattcta

SEQ ID NO: 32908 - DNA, 21 bp, Homo sapiens
atttaacaacrttagacaact

SEQ ID NO: 32909 - DNA, 21 bp, Homo sapiens
cactgtacccrtctcaccttc

SEQ ID NO: 32910 - DNA, 21 bp, Homo sapiens
atcacatagamaggaattctg

SEQ ID NO: 32911 - DNA, 21 bp, Homo sapiens
cctctctctakgcctttattc

SEQ ID NO: 32912 - DNA, 21 bp, Homo sapiens
catcttatttyctcatggagc

SEQ ID NO: 32913 - DNA, 21 bp, Homo sapiens
ttttccacttmattactcctg

SEQ ID NO: 32914 - DNA, 21 bp, Homo sapiens
ttatttgttcrtgggaacttg

SEQ ID NO: 32915 - DNA, 21 bp, Homo sapiens
gaacaaagacrtgaagaaaca

SEQ ID NO: 32916 - DNA, 21 bp, Homo sapiens
acaccaatggycttgagatga

SEQ ID NO: 32917 - DNA, 21 bp, Homo sapiens
aggttccacasctgcttcaca

SEQ ID NO: 32918 - DNA, 21 bp, Homo sapiens
agacgagcttkccttccggga

SEQ ID NO: 32919 - DNA, 21 bp, Homo sapiens
tgacaagaagwgttcaaacat

SEQ ID NO: 32920 - DNA, 21 bp, Homo sapiens
aggcctccacmatgtggccat

SEQ ID NO: 32921 - DNA, 21 bp, Homo sapiens
ccatctcaagyataggtaagg

SEQ ID NO: 32922 - DNA, 21 bp, Homo sapiens
ttaataatgcyagttacaatg

SEQ ID NO: 32923 - DNA, 21 bp, Homo sapiens
gttggaaactsttgggcagag

SEQ ID NO: 32924 - DNA, 21 bp, Homo sapiens
tgatgtttatsagagatctca

SEQ ID NO: 32925 - DNA, 21 bp, Homo sapiens
acaattggctrtttatatttt

SEQ ID NO: 32926 - DNA, 21 bp, Homo sapiens
ctgtccctccyggtcatacct

SEQ ID NO: 32927 - DNA, 21 bp, Homo sapiens
caggagaaaawgaaagtggaa

SEQ ID NO: 32928 - DNA, 21 bp, Homo sapiens
ggaacattctrgggtgctgga

SEQ ID NO: 32929 - DNA, 21 bp, Homo sapiens
tctctaaagckggggtgatta

SEQ ID NO: 32930 - DNA, 21 bp, Homo sapiens
caactaccttmtctacctctt

SEQ ID NO: 32931 - DNA, 21 bp, Homo sapiens
tctatgaagcrcttatctcct

SEQ ID NO: 32932 - DNA, 21 bp, Homo sapiens
ctctgtcctcyttctggggcc

SEQ ID NO: 32933 - DNA, 21 bp, Homo sapiens
aaggggggctsttgtcagtat

SEQ ID NO: 32934 - DNA, 21 bp, Homo sapiens
acttcataagyattttatcag

SEQ ID NO: 32935 - DNA, 21 bp, Homo sapiens
agtagggcctraactggggca

SEQ ID NO: 32936 - DNA, 21 bp, Homo sapiens
gcaattactcygcttgctgtg

SEQ ID NO: 32937 - DNA, 21 bp, Homo sapiens
ataataacaayaacacagaag

SEQ ID NO: 32938 - DNA, 21 bp, Homo sapiens
tcccttaaacrtgaggaatta

SEQ ID NO: 32939 - DNA, 21 bp, Homo sapiens
atacttctccrggctctcact

SEQ ID NO: 32940 - DNA, 21 bp, Homo sapiens
tgtgggatggsacacctttgt

SEQ ID NO: 32941 - DNA, 21 bp, Homo sapiens
agatcttcaayggctccgtat

SEQ ID NO: 32942 - DNA, 21 bp, Homo sapiens
gagtaccagtrtgtgagagct

SEQ ID NO: 32943 - DNA, 21 bp, Homo sapiens
tatacaatgcratgttactaa

SEQ ID NO: 32944 - DNA, 21 bp, Homo sapiens
gcaggtggtargaggtaccat

SEQ ID NO: 32945 - DNA, 21 bp, Homo sapiens
gtcctctggasccagaaagtc

SEQ ID NO: 32946 - DNA, 21 bp, Homo sapiens
ccttttgtgawagcaaattgt

SEQ ID NO: 32947 - DNA, 21 bp, Homo sapiens
tcaaatttgtyttaaaacatg

SEQ ID NO: 32948 - DNA, 21 bp, Homo sapiens
aagttaatgaytttaaagata

SEQ ID NO: 32949 - DNA, 21 bp, Homo sapiens
ggtccaaggaraaaaatagaa

SEQ ID NO: 32950 - DNA, 21 bp, Homo sapiens
aggctaggtgrttacgtttta

SEQ ID NO: 32951 - DNA, 21 bp, Homo sapiens
ccaaggagcayctattgagct

SEQ ID NO: 32952 - DNA, 21 bp, Homo sapiens
tttatattttycaaagcattc

SEQ ID NO: 32953 - DNA, 21 bp, Homo sapiens
agaaggtccasactgacttgt

SEQ ID NO: 32954 - DNA, 21 bp, Homo sapiens
ttcattaaccwggagctttat

SEQ ID NO: 32955 - DNA, 21 bp, Homo sapiens
gatcttgaagycaaatttggt

SEQ ID NO: 32956 - DNA, 21 bp, Homo sapiens
cggacctattyttagctcagc

SEQ ID NO: 32957 - DNA, 21 bp, Homo sapiens
tctttatttaygaccaagcta

SEQ ID NO: 32958 - DNA, 21 bp, Homo sapiens
tgggaaagggmaagaaaggat

SEQ ID NO: 32959 - DNA, 21 bp, Homo sapiens
tgaccacctcytttgtcagct

SEQ ID NO: 32960 - DNA, 21 bp, Homo sapiens
taaaatttttyatacatgttt

SEQ ID NO: 32961 - DNA, 21 bp, Homo sapiens
ggttactggaraaggtgctgg

SEQ ID NO: 32962 - DNA, 21 bp, Homo sapiens
aatgcttactyaggaaatagt

SEQ ID NO: 32963 - DNA, 21 bp, Homo sapiens
actagaagttktacctggcac

SEQ ID NO: 32964 - DNA, 21 bp, Homo sapiens
gccagcggagkcgcagggcag

SEQ ID NO: 32965 - DNA, 21 bp, Homo sapiens
cacataagttkactctgccct

SEQ ID NO: 32966 - DNA, 21 bp, Homo sapiens
acctctgaggkcagtgactcc

SEQ ID NO: 32967 - DNA, 21 bp, Homo sapiens
tactgtgcctyatgggcaggt

SEQ ID NO: 32968 - DNA, 21 bp, Homo sapiens
ggggcatgccrttctgttgta

SEQ ID NO: 32969 - DNA, 21 bp, Homo sapiens
tatcagacacmttttagaaca

SEQ ID NO: 32970 - DNA, 21 bp, Homo sapiens
cccatcacccyctagaatagc

SEQ ID NO: 32971 - DNA, 21 bp, Homo sapiens
cagaggtaagrcactttactt

SEQ ID NO: 32972 - DNA, 21 bp, Homo sapiens
aggttagtggkgagcagtaga

SEQ ID NO: 32973 - DNA, 21 bp, Homo sapiens
tggcatggtcrgagacttaca

SEQ ID NO: 32974 - DNA, 21 bp, Homo sapiens
gtttcctctayagaggggttt

SEQ ID NO: 32975 - DNA, 21 bp, Homo sapiens
cctggaattgwtgttgttgtt

SEQ ID NO: 32976 - DNA, 21 bp, Homo sapiens
caactcgaccrccagttcatg

SEQ ID NO: 32977 - DNA, 21 bp, Homo sapiens
tctggtttatrtcactccaga

SEQ ID NO: 32978 - DNA, 21 bp, Homo sapiens
caattatacaytcagggacca

SEQ ID NO: 32979 - DNA, 21 bp, Homo sapiens
gtctccagacrtgttatttat

SEQ ID NO: 32980 - DNA, 21 bp, Homo sapiens
tgatataatgmatttagaagg

SEQ ID NO: 32981 - DNA, 21 bp, Homo sapiens
gagtaaaaggrccagaatgca

SEQ ID NO: 32982 - DNA, 21 bp, Homo sapiens
aggacactcaragcagagtgg

SEQ ID NO: 32983 - DNA, 21 bp, Homo sapiens
agggagatgamaacattgaga

SEQ ID NO: 32984 - DNA, 21 bp, Homo sapiens
cccctttgtgytatcccaatc

SEQ ID NO: 32985 - DNA, 21 bp, Homo sapiens
gcatccagccyaatcagcctt

SEQ ID NO: 32986 - DNA, 21 bp, Homo sapiens
ttctttgcccrtcagcttcac

SEQ ID NO: 32987 - DNA, 21 bp, Homo sapiens
ctgttattccyttccccactc

SEQ ID NO: 32988 - DNA, 21 bp, Homo sapiens
ctgtcatcatycttcctgtat

SEQ ID NO: 32989 - DNA, 21 bp, Homo sapiens
gaacagaacaygtgcccagga

SEQ ID NO: 32990 - DNA, 21 bp, Homo sapiens
atagagccacsgaaaatgact

SEQ ID NO: 32991 - DNA, 21 bp, Homo sapiens
ggaaatttcakaacattggaa

SEQ ID NO: 32992 - DNA, 21 bp, Homo sapiens
aaggtacaaakaagttaggtt

SEQ ID NO: 32993 - DNA, 21 bp, Homo sapiens
tacacagacaragcagctcat

SEQ ID NO: 32994 - DNA, 21 bp, Homo sapiens
gctccacgcargaattagctc

SEQ ID NO: 32995 - DNA, 21 bp, Homo sapiens
cggattaaatrtaatgggaag

SEQ ID NO: 32996 - DNA, 21 bp, Homo sapiens
gtcatgccttytgatgactgc

SEQ ID NO: 32997 - DNA, 21 bp, Homo sapiens
gggctttcaaygtgtatatca

SEQ ID NO: 32998 - DNA, 21 bp, Homo sapiens
aaaggaaaggyaagtacaacg

SEQ ID NO: 32999 - DNA, 21 bp, Homo sapiens
cttcactcccrtttctgcaag

SEQ ID NO: 33000 - DNA, 21 bp, Homo sapiens
cagctaaaggrgccaatacca

SEQ ID NO: 33001 - DNA, 21 bp, Homo sapiens
gtatatgctayatgtagtgtt

SEQ ID NO: 33002 - DNA, 21 bp, Homo sapiens
aaaagagaggmtccactgctg

SEQ ID NO: 33003 - DNA, 21 bp, Homo sapiens
tttatttaatrttaaatagag

SEQ ID NO: 33004 - DNA, 21 bp, Homo sapiens
ctgtacactgraaagtctagt

SEQ ID NO: 33005 - DNA, 21 bp, Homo sapiens
cttaatattcwccatgtgctg

SEQ ID NO: 33006 - DNA, 21 bp, Homo sapiens
tgcaccatgtyggagtaaatg

SEQ ID NO: 33007 - DNA, 21 bp, Homo sapiens
ctgttttagtraagtacgtca

SEQ ID NO: 33008 - DNA, 21 bp, Homo sapiens
taggggatgarggatagcgat

SEQ ID NO: 33009 - DNA, 21 bp, Homo sapiens
ctcttactgcrtttcttgtac

SEQ ID NO: 33010 - DNA, 21 bp, Homo sapiens
ccctttgttamgtgaaggtgt

SEQ ID NO: 33011 - DNA, 21 bp, Homo sapiens
cagaattccayaggctggttt

SEQ ID NO: 33012 - DNA, 21 bp, Homo sapiens
cctgatatccrtaattttcac

SEQ ID NO: 33013 - DNA, 21 bp, Homo sapiens
cccatttgatycatcctgcct

SEQ ID NO: 33014 - DNA, 21 bp, Homo sapiens
ggtaaagaackgagaaagaca

SEQ ID NO: 33015 - DNA, 21 bp, Homo sapiens
agaattaattkataggatttg

SEQ ID NO: 33016 - DNA, 21 bp, Homo sapiens
tcctatggagsaggcctagtg

SEQ ID NO: 33017 - DNA, 21 bp, Homo sapiens
cagaggtgaartgactgatcc

SEQ ID NO: 33018 - DNA, 21 bp, Homo sapiens
attataaatgrtattagactt

SEQ ID NO: 33019 - DNA, 21 bp, Homo sapiens
gcagaccatgkggctgtgaat

SEQ ID NO: 33020 - DNA, 21 bp, Homo sapiens
tctagcagagwctatttgcct

SEQ ID NO: 33021 - DNA, 21 bp, Homo sapiens
ccagaagtgtkatgctgtgct

SEQ ID NO: 33022 - DNA, 21 bp, Homo sapiens
acagagaaacmttgtcttttg

SEQ ID NO: 33023 - DNA, 21 bp, Homo sapiens
gagattctgcrtgtctaacca

SEQ ID NO: 33024 - DNA, 21 bp, Homo sapiens
gaagaagaacrtttaaaactg

SEQ ID NO: 33025 - DNA, 21 bp, Homo sapiens
atgcatggcayctcacatggt

SEQ ID NO: 33026 - DNA, 21 bp, Homo sapiens
gcttttactamatttttctct

SEQ ID NO: 33027 - DNA, 21 bp, Homo sapiens
tagaattcctraagttagtga

SEQ ID NO: 33028 - DNA, 21 bp, Homo sapiens
gagggataagrtaattttggg

SEQ ID NO: 33029 - DNA, 21 bp, Homo sapiens
aaaaatttttsaacaaatttt

SEQ ID NO: 33030 - DNA, 21 bp, Homo sapiens
acagccactgyccctcttctt

SEQ ID NO: 33031 - DNA, 21 bp, Homo sapiens
ttttaaacccktcaaggcatt

SEQ ID NO: 33032 - DNA, 21 bp, Homo sapiens
gcccgaaatamgtgggcccag

SEQ ID NO: 33033 - DNA, 21 bp, Homo sapiens
taccttgggtrtatatattgg

SEQ ID NO: 33034 - DNA, 21 bp, Homo sapiens
caggtcatggkggacatcaaa

SEQ ID NO: 33035 - DNA, 21 bp, Homo sapiens
aacctttgtcrttggtctact

SEQ ID NO: 33036 - DNA, 21 bp, Homo sapiens
gcctagtgccsagaaaaccca

SEQ ID NO: 33037 - DNA, 21 bp, Homo sapiens
cagagatgtgracgtcatggc

SEQ ID NO: 33038 - DNA, 21 bp, Homo sapiens
acattgatccyggatgcagct

SEQ ID NO: 33039 - DNA, 21 bp, Homo sapiens
ccagggagaaygagagagaga

SEQ ID NO: 33040 - DNA, 21 bp, Homo sapiens
tatgtaagatwtaaccaaatt

SEQ ID NO: 33041 - DNA, 21 bp, Homo sapiens
ttttgctaaartcatgtaatg

SEQ ID NO: 33042 - DNA, 21 bp, Homo sapiens
tgtctggcacrtggctgggaa

SEQ ID NO: 33043 - DNA, 21 bp, Homo sapiens
ggaaaagtggytacctggagg

SEQ ID NO: 33044 - DNA, 21 bp, Homo sapiens
aatagtagtcraggacttcaa

SEQ ID NO: 33045 - DNA, 21 bp, Homo sapiens
ataaaattagstacattgcca

SEQ ID NO: 33046 - DNA, 21 bp, Homo sapiens
ggccaggcacrgaggctcata

SEQ ID NO: 33047 - DNA, 21 bp, Homo sapiens
agggattataragtgttgagg

SEQ ID NO: 33048 - DNA, 21 bp, Homo sapiens
agtgccattgytgccttcaaa

SEQ ID NO: 33049 - DNA, 21 bp, Homo sapiens
tgaaaatgttkactagtgaat

SEQ ID NO: 33050 - DNA, 21 bp, Homo sapiens
cattgaaaggrataaagggag

SEQ ID NO: 33051 - DNA, 21 bp, Homo sapiens
tgggcaccaaragaacaaaac

SEQ ID NO: 33052 - DNA, 21 bp, Homo sapiens
taagctttagwtggtggtgct

SEQ ID NO: 33053 - DNA, 21 bp, Homo sapiens
cagttttctcyagagggactg

SEQ ID NO: 33054 - DNA, 21 bp, Homo sapiens
cacaacaggtkaggctgggac

SEQ ID NO: 33055 - DNA, 21 bp, Homo sapiens
tcacttgtcasgaaaatattt

SEQ ID NO: 33056 - DNA, 21 bp, Homo sapiens
gcaagaaacargaagagagaa

SEQ ID NO: 33057 - DNA, 21 bp, Homo sapiens
tattctgttaygtttattttg

SEQ ID NO: 33058 - DNA, 21 bp, Homo sapiens
ttttgtcaatyaccgagagag

SEQ ID NO: 33059 - DNA, 21 bp, Homo sapiens
tgacctttcamactgacttat

SEQ ID NO: 33060 - DNA, 21 bp, Homo sapiens
aaatgtatttmaattttttga

SEQ ID NO: 33061 - DNA, 21 bp, Homo sapiens
ctgtaaacctyactggggctt

SEQ ID NO: 33062 - DNA, 21 bp, Homo sapiens
tgacctaaacygaaaaagagt

SEQ ID NO: 33063 - DNA, 21 bp, Homo sapiens
ttgtagacttkcaaggaagct

SEQ ID NO: 33064 - DNA, 21 bp, Homo sapiens
tgtgtgctccrttgttgggta

SEQ ID NO: 33065 - DNA, 21 bp, Homo sapiens
gagtaattagygtgtaaggtt

SEQ ID NO: 33066 - DNA, 21 bp, Homo sapiens
atcactgtgcsccttttagag

SEQ ID NO: 33067 - DNA, 21 bp, Homo sapiens
aaaaaggtctrtagttcctct

SEQ ID NO: 33068 - DNA, 21 bp, Homo sapiens
gcgctctcctrcctcagatga

SEQ ID NO: 33069 - DNA, 21 bp, Homo sapiens
gatcagatcgmtgccctacac

SEQ ID NO: 33070 - DNA, 21 bp, Homo sapiens
taaaattcatyaactatacct

SEQ ID NO: 33071 - DNA, 21 bp, Homo sapiens
tcatttgtacrtgttctgtag

SEQ ID NO: 33072 - DNA, 21 bp, Homo sapiens
gtggttatgtmggacgatttg

SEQ ID NO: 33073 - DNA, 21 bp, Homo sapiens
agtgattgcaytgggacaacg

SEQ ID NO: 33074 - DNA, 21 bp, Homo sapiens
tgcctctgcayagcatttttg

SEQ ID NO: 33075 - DNA, 21 bp, Homo sapiens
ccagtgtctgytgttcccatg

SEQ ID NO: 33076 - DNA, 21 bp, Homo sapiens
atcacatgatrttttacttaa

SEQ ID NO: 33077 - DNA, 21 bp, Homo sapiens
ttcagcttctrttctccctct

SEQ ID NO: 33078 - DNA, 21 bp, Homo sapiens
ggtgttaaaayatccaattcg

SEQ ID NO: 33079 - DNA, 21 bp, Homo sapiens
caacagttccyttcagagcag

SEQ ID NO: 33080 - DNA, 21 bp, Homo sapiens
ggagcctgaasttgaggctac

SEQ ID NO: 33081 - DNA, 21 bp, Homo sapiens
ggtctctgccrtaaggaatga

SEQ ID NO: 33082 - DNA, 21 bp, Homo sapiens
gtgaaaccatwcccttgggag

SEQ ID NO: 33083 - DNA, 21 bp, Homo sapiens
ggggttggctytgcagctggt

SEQ ID NO: 33084 - DNA, 21 bp, Homo sapiens
gcctgagataktatttctctg

SEQ ID NO: 33085 - DNA, 21 bp, Homo sapiens
atgaatgagayagctgctgca

SEQ ID NO: 33086 - DNA, 21 bp, Homo sapiens
tcttcagtatrcaatttttgt

SEQ ID NO: 33087 - DNA, 21 bp, Homo sapiens
ctcatcatttytggttcgcac

SEQ ID NO: 33088 - DNA, 21 bp, Homo sapiens
cccagattggmacctcgaaat

SEQ ID NO: 33089 - DNA, 21 bp, Homo sapiens
tgcctctcatratcacatgtt

SEQ ID NO: 33090 - DNA, 21 bp, Homo sapiens
aggcctcatargttgtacttt

SEQ ID NO: 33091 - DNA, 21 bp, Homo sapiens
aggcttaagayggctgcccgt

SEQ ID NO: 33092 - DNA, 21 bp, Homo sapiens
tccagccctgrcatcagcttt

SEQ ID NO: 33093 - DNA, 21 bp, Homo sapiens
ctgtcactagkcacgtcctac

SEQ ID NO: 33094 - DNA, 21 bp, Homo sapiens
ttggtcttacrttagataccc

SEQ ID NO: 33095 - DNA, 21 bp, Homo sapiens
ggtgcttcccrtcatccagct

SEQ ID NO: 33096 - DNA, 21 bp, Homo sapiens
ttcccttttgygttatatttg

SEQ ID NO: 33097 - DNA, 21 bp, Homo sapiens
gaggttaaagmaaaactgtgg

SEQ ID NO: 33098 - DNA, 21 bp, Homo sapiens
gtgtagcatgygctctgaagt

SEQ ID NO: 33099 - DNA, 21 bp, Homo sapiens
ctacagtggastattttctct

SEQ ID NO: 33100 - DNA, 21 bp, Homo sapiens
gcatttgacarttacactgag

SEQ ID NO: 33101 - DNA, 21 bp, Homo sapiens
ttctagccccmgaccctctca

SEQ ID NO: 33102 - DNA, 21 bp, Homo sapiens
cttttagggcytggcagtcca

SEQ ID NO: 33103 - DNA, 21 bp, Homo sapiens
ataatggcccrtaaagatctt

SEQ ID NO: 33104 - DNA, 21 bp, Homo sapiens
agtcctgtctrttttcaagcc

SEQ ID NO: 33105 - DNA, 21 bp, Homo sapiens
atctcaagackggtacagagt

SEQ ID NO: 33106 - DNA, 21 bp, Homo sapiens
tccttctttgsacaaggtctt

SEQ ID NO: 33107 - DNA, 21 bp, Homo sapiens
acagggctggraaaggccggg

SEQ ID NO: 33108 - DNA, 21 bp, Homo sapiens
ctatttatccrtatgctatct

SEQ ID NO: 33109 - DNA, 21 bp, Homo sapiens
agatgttatcrtacatttata

SEQ ID NO: 33110 - DNA, 21 bp, Homo sapiens
tcaaacatcaygaaatacaaa

SEQ ID NO: 33111 - DNA, 21 bp, Homo sapiens
gccattctaayaagtgtacag

SEQ ID NO: 33112 - DNA, 21 bp, Homo sapiens
tttgaccaaamtgaatggtac

SEQ ID NO: 33113 - DNA, 21 bp, Homo sapiens
attcaaggacrctgtaaattc

SEQ ID NO: 33114 - DNA, 21 bp, Homo sapiens
actctccctcwctctctacct

SEQ ID NO: 33115 - DNA, 21 bp, Homo sapiens
gggctctaacrttcctgcaaa

SEQ ID NO: 33116 - DNA, 21 bp, Homo sapiens
gacacaaatcrtaaagtcaag

SEQ ID NO: 33117 - DNA, 21 bp, Homo sapiens
cagcagagccrcaactctgac

SEQ ID NO: 33118 - DNA, 21 bp, Homo sapiens
aaattctaacmaagacaaaga

SEQ ID NO: 33119 - DNA, 21 bp, Homo sapiens
gtgtgtatttktctactttct

SEQ ID NO: 33120 - DNA, 21 bp, Homo sapiens
atacatgaatmcttggaactt

SEQ ID NO: 33121 - DNA, 21 bp, Homo sapiens
aggtaggaatktcagtgtaaa

SEQ ID NO: 33122 - DNA, 21 bp, Homo sapiens
gaacatttacratttgcattt

SEQ ID NO: 33123 - DNA, 21 bp, Homo sapiens
tctgtgataayttgataagtc

SEQ ID NO: 33124 - DNA, 21 bp, Homo sapiens
gccttgagaarcactgaagga

SEQ ID NO: 33125 - DNA, 21 bp, Homo sapiens
ttacaaaaagrgttaaaggag

SEQ ID NO: 33126 - DNA, 21 bp, Homo sapiens
cccaattgtcrtattgcttct

SEQ ID NO: 33127 - DNA, 21 bp, Homo sapiens
ttagaaaaagyagatttcaga

SEQ ID NO: 33128 - DNA, 21 bp, Homo sapiens
gtgtttgtatrtgcgtgttgg

SEQ ID NO: 33129 - DNA, 21 bp, Homo sapiens
aagttgaattktatcttggaa

SEQ ID NO: 33130 - DNA, 21 bp, Homo sapiens
aactgattacrtgtgttccca

SEQ ID NO: 33131 - DNA, 21 bp, Homo sapiens
tggctctgcastgatgaagca

SEQ ID NO: 33132 - DNA, 21 bp, Homo sapiens
aaaccctgggkctctcatttc

SEQ ID NO: 33133 - DNA, 21 bp, Homo sapiens
tttatttgccmtgaaatgact

SEQ ID NO: 33134 - DNA, 21 bp, Homo sapiens
gcatttgcttsatgacatacc

SEQ ID NO: 33135 - DNA, 21 bp, Homo sapiens
aaattaagatmagattggcta

SEQ ID NO: 33136 - DNA, 21 bp, Homo sapiens
ggatcgactgmtaatgggtat

SEQ ID NO: 33137 - DNA, 21 bp, Homo sapiens
ttgagttcccragatcaacat

SEQ ID NO: 33138 - DNA, 21 bp, Homo sapiens
ccatttcatgwtattttaaaa

SEQ ID NO: 33139 - DNA, 21 bp, Homo sapiens
ggctccaagawagatggtgaa

SEQ ID NO: 33140 - DNA, 21 bp, Homo sapiens
aaagggagtayctcacacagt

SEQ ID NO: 33141 - DNA, 21 bp, Homo sapiens
gagatggaggmgtcccacagc

SEQ ID NO: 33142 - DNA, 21 bp, Homo sapiens
aaagctttctkgtctccccca

SEQ ID NO: 33143 - DNA, 21 bp, Homo sapiens
gtaattatgcktaaattttct

SEQ ID NO: 33144 - DNA, 21 bp, Homo sapiens
acatttacaaytagttggagt

SEQ ID NO: 33145 - DNA, 21 bp, Homo sapiens
ttctttttttktttgttttac

SEQ ID NO: 33146 - DNA, 21 bp, Homo sapiens
ataaataaacyttctcagttc

SEQ ID NO: 33147 - DNA, 21 bp, Homo sapiens
gtaatcatgtrttatttaaca

SEQ ID NO: 33148 - DNA, 21 bp, Homo sapiens
tttccttggtrtatactgttt

SEQ ID NO: 33149 - DNA, 21 bp, Homo sapiens
acacaaattgyacatgccatt

SEQ ID NO: 33150 - DNA, 21 bp, Homo sapiens
ctatgaggtcrtcctggggca

SEQ ID NO: 33151 - DNA, 21 bp, Homo sapiens
cacaattcccmtgtgaagaaa

SEQ ID NO: 33152 - DNA, 21 bp, Homo sapiens
ggaaactcacyaaacaggtaa

SEQ ID NO: 33153 - DNA, 21 bp, Homo sapiens
catttgacttyctttcttttt

SEQ ID NO: 33154 - DNA, 21 bp, Homo sapiens
gagaatgagtscttgctgaga

SEQ ID NO: 33155 - DNA, 21 bp, Homo sapiens
atcttttatayagtcaatgct

SEQ ID NO: 33156 - DNA, 21 bp, Homo sapiens
tgtaatttctrcaagtatttt

SEQ ID NO: 33157 - DNA, 21 bp, Homo sapiens
ccaacttatamcacaatcaaa

SEQ ID NO: 33158 - DNA, 21 bp, Homo sapiens
ggattttatargaaattgctc

SEQ ID NO: 33159 - DNA, 21 bp, Homo sapiens
accatgtaaakacatatgtat

SEQ ID NO: 33160 - DNA, 21 bp, Homo sapiens
attgtaatttmctaccagctg

SEQ ID NO: 33161 - DNA, 21 bp, Homo sapiens
tagttgacacwgctagtaagt

SEQ ID NO: 33162 - DNA, 21 bp, Homo sapiens
tttcttctttwtattttgtac

SEQ ID NO: 33163 - DNA, 21 bp, Homo sapiens
tgaagtaaaartggttactgt

SEQ ID NO: 33164 - DNA, 21 bp, Homo sapiens
gggccaagttragagctgtat

SEQ ID NO: 33165 - DNA, 21 bp, Homo sapiens
agtggttgcarttactgtggt

SEQ ID NO: 33166 - DNA, 21 bp, Homo sapiens
gcaaaaatagygatgatagta

SEQ ID NO: 33167 - DNA, 21 bp, Homo sapiens
tatcatctttyaatcctaatg

SEQ ID NO: 33168 - DNA, 21 bp, Homo sapiens
ccttcagacaygctttgctat

SEQ ID NO: 33169 - DNA, 21 bp, Homo sapiens
tcagtgagccragattgccca

SEQ ID NO: 33170 - DNA, 21 bp, Homo sapiens
ggttttttttwaaaaaaaagc

SEQ ID NO: 33171 - DNA, 21 bp, Homo sapiens
gaggcaatagractaaactcc

SEQ ID NO: 33172 - DNA, 21 bp, Homo sapiens
gaagggtctgygtttatccct

SEQ ID NO: 33173 - DNA, 21 bp, Homo sapiens
ttcttagggtyctgacaacca

SEQ ID NO: 33174 - DNA, 21 bp, Homo sapiens
ctgcttgtccrgcaacctcgg

SEQ ID NO: 33175 - DNA, 21 bp, Homo sapiens
catgtctcacscccaccttgg

SEQ ID NO: 33176 - DNA, 21 bp, Homo sapiens
cagatcaccaycccctaatta

SEQ ID NO: 33177 - DNA, 21 bp, Homo sapiens
gcaggctctgsgtgttcagtg

SEQ ID NO: 33178 - DNA, 21 bp, Homo sapiens
gaaataagccwgtctgtgcag

SEQ ID NO: 33179 - DNA, 21 bp, Homo sapiens
cccctctcatyacggcatccg

SEQ ID NO: 33180 - DNA, 21 bp, Homo sapiens
gtgacactttytgctgtttta

SEQ ID NO: 33181 - DNA, 21 bp, Homo sapiens
cagcccaaagygctctcaact

SEQ ID NO: 33182 - DNA, 21 bp, Homo sapiens
tgttaagcagmtgatcttaac

SEQ ID NO: 33183 - DNA, 21 bp, Homo sapiens
agtggtcctgycttcttctca

SEQ ID NO: 33184 - DNA, 21 bp, Homo sapiens
taaaggtcccrtgaggagaaa

SEQ ID NO: 33185 - DNA, 21 bp, Homo sapiens
aatgctcctcrtgttatagcc

SEQ ID NO: 33186 - DNA, 21 bp, Homo sapiens
atcagagacargtgcttccca

SEQ ID NO: 33187 - DNA, 21 bp, Homo sapiens
cttacctctcsgtcactgtct

SEQ ID NO: 33188 - DNA, 21 bp, Homo sapiens
tgctgaatgarggagggagtg

SEQ ID NO: 33189 - DNA, 21 bp, Homo sapiens
gtcccacaccygcctcctgga

SEQ ID NO: 33190 - DNA, 21 bp, Homo sapiens
tattaaagttktcttaatgta

SEQ ID NO: 33191 - DNA, 21 bp, Homo sapiens
tctattccacyacgccctgcc

SEQ ID NO: 33192 - DNA, 21 bp, Homo sapiens
tgccctgggcyggccagaacg

SEQ ID NO: 33193 - DNA, 21 bp, Homo sapiens
aaccctgagtrccagccctgc

SEQ ID NO: 33194 - DNA, 21 bp, Homo sapiens
attgagtttcrgtgcccaaat

SEQ ID NO: 33195 - DNA, 21 bp, Homo sapiens
ttacacaatcrtataatactc

SEQ ID NO: 33196 - DNA, 21 bp, Homo sapiens
ttccaataacyccctctttgg

SEQ ID NO: 33197 - DNA, 21 bp, Homo sapiens
ctactcatctkgcatacttga

SEQ ID NO: 33198 - DNA, 21 bp, Homo sapiens
cctttctcccyagaaagatgt

SEQ ID NO: 33199 - DNA, 21 bp, Homo sapiens
gtgtgagttcrcatctcttat

SEQ ID NO: 33200 - DNA, 21 bp, Homo sapiens
cacagtttgcytgctgttgtg

SEQ ID NO: 33201 - DNA, 21 bp, Homo sapiens
ttcatggaccrctgcctgggt

SEQ ID NO: 33202 - DNA, 21 bp, Homo sapiens
tttacccagtsggcttcagag

SEQ ID NO: 33203 - DNA, 21 bp, Homo sapiens
tgaaactcatyggatgactaa

SEQ ID NO: 33204 - DNA, 21 bp, Homo sapiens
cctccctcccrttcttagcta

SEQ ID NO: 33205 - DNA, 21 bp, Homo sapiens
gctccaaccayctgtattatt

SEQ ID NO: 33206 - DNA, 21 bp, Homo sapiens
ccttttgtggscttcctgtct

SEQ ID NO: 33207 - DNA, 21 bp, Homo sapiens
ctcccaaaccrggttaggagc

SEQ ID NO: 33208 - DNA, 21 bp, Homo sapiens
tatatttgatkaggttaagtt

SEQ ID NO: 33209 - DNA, 21 bp, Homo sapiens
cctggccattygtcacttggg

SEQ ID NO: 33210 - DNA, 21 bp, Homo sapiens
aagaaatcatrttagggaact

SEQ ID NO: 33211 - DNA, 21 bp, Homo sapiens
ctgcagagtamgttgtttctt

SEQ ID NO: 33212 - DNA, 21 bp, Homo sapiens
tagctttgaartaatctccca

SEQ ID NO: 33213 - DNA, 21 bp, Homo sapiens
agggtcaggtygggtaggaga

SEQ ID NO: 33214 - DNA, 21 bp, Homo sapiens
ctcttccactmctccctgaac

SEQ ID NO: 33215 - DNA, 21 bp, Homo sapiens
taacctgtctratgtattaaa

SEQ ID NO: 33216 - DNA, 21 bp, Homo sapiens
ccctttcacartagtaaatca

SEQ ID NO: 33217 - DNA, 21 bp, Homo sapiens
actatgagctytggcttagga

SEQ ID NO: 33218 - DNA, 21 bp, Homo sapiens
tccaatgagargagccaccat

SEQ ID NO: 33219 - DNA, 21 bp, Homo sapiens
agagacagaaktgcccttctg

SEQ ID NO: 33220 - DNA, 21 bp, Homo sapiens
tggcaggcacygacagagcac

SEQ ID NO: 33221 - DNA, 21 bp, Homo sapiens
actcctgagakagtgtaatta

SEQ ID NO: 33222 - DNA, 21 bp, Homo sapiens
gtatataactmaaggtaatgg

SEQ ID NO: 33223 - DNA, 21 bp, Homo sapiens
ttaagttctayattttgccta

SEQ ID NO: 33224 - DNA, 21 bp, Homo sapiens
atggtcctccrattctaaatt

SEQ ID NO: 33225 - DNA, 21 bp, Homo sapiens
agccttaggtyactgctctct

SEQ ID NO: 33226 - DNA, 21 bp, Homo sapiens
cggcagtcatkaccttccggg

SEQ ID NO: 33227 - DNA, 21 bp, Homo sapiens
taaataattamcttgttaagt

SEQ ID NO: 33228 - DNA, 21 bp, Homo sapiens
taaacatttgraaagaaacaa

SEQ ID NO: 33229 - DNA, 21 bp, Homo sapiens
ttgagtcatcmggcaatacaa

SEQ ID NO: 33230 - DNA, 21 bp, Homo sapiens
ctacactattkatatatttat

SEQ ID NO: 33231 - DNA, 21 bp, Homo sapiens
ttatcatagaratatgctttg

SEQ ID NO: 33232 - DNA, 21 bp, Homo sapiens
ttgaagagttrgtaaattatg

SEQ ID NO: 33233 - DNA, 21 bp, Homo sapiens
atagtgttgayctacatatct

SEQ ID NO: 33234 - DNA, 21 bp, Homo sapiens
ccaaaaatctyataccctacc

SEQ ID NO: 33235 - DNA, 21 bp, Homo sapiens
tgaatgaacaygcaaggaacc

SEQ ID NO: 33236 - DNA, 21 bp, Homo sapiens
tttaagggtcwctgaatgtga

SEQ ID NO: 33237 - DNA, 21 bp, Homo sapiens
taagatagaayatatcctggg

SEQ ID NO: 33238 - DNA, 21 bp, Homo sapiens
tgtgaacctarggatggtgga

SEQ ID NO: 33239 - DNA, 21 bp, Homo sapiens
atagaggactyaaatacttag

SEQ ID NO: 33240 - DNA, 21 bp, Homo sapiens
ttatccctttragttatctgc

SEQ ID NO: 33241 - DNA, 21 bp, Homo sapiens
catttgaaaaygataattttg

SEQ ID NO: 33242 - DNA, 21 bp, Homo sapiens
gacacagagcmaaactatatc

SEQ ID NO: 33243 - DNA, 21 bp, Homo sapiens
agaaaaagtamtgatacatgc

SEQ ID NO: 33244 - DNA, 21 bp, Homo sapiens
atttttctctyagagccaata

SEQ ID NO: 33245 - DNA, 21 bp, Homo sapiens
caccccctaayaggccccaat

SEQ ID NO: 33246 - DNA, 21 bp, Homo sapiens
taaaatgtttycttaaggcta

SEQ ID NO: 33247 - DNA, 21 bp, Homo sapiens
gcccccaccaygatcctgacc

SEQ ID NO: 33248 - DNA, 21 bp, Homo sapiens
cacttccagcrgcatcctgag

SEQ ID NO: 33249 - DNA, 21 bp, Homo sapiens
tagctcgtggraggagcaaca

SEQ ID NO: 33250 - DNA, 21 bp, Homo sapiens
gacaatgtcayctaggcctca

SEQ ID NO: 33251 - DNA, 21 bp, Homo sapiens
aagaataaacraccagacata

SEQ ID NO: 33252 - DNA, 21 bp, Homo sapiens
acctccaacartcactactcc

SEQ ID NO: 33253 - DNA, 21 bp, Homo sapiens
aggcgctcatratgcttatat

SEQ ID NO: 33254 - DNA, 21 bp, Homo sapiens
cccgattccaygactgtctcc

SEQ ID NO: 33255 - DNA, 21 bp, Homo sapiens
atgtttggacrtctcagccat

SEQ ID NO: 33256 - DNA, 21 bp, Homo sapiens
atcacactccrcgctgtctca

SEQ ID NO: 33257 - DNA, 21 bp, Homo sapiens
ccagagcccayctagacttgt

SEQ ID NO: 33258 - DNA, 21 bp, Homo sapiens
tgatgcctcayggggggatct

SEQ ID NO: 33259 - DNA, 21 bp, Homo sapiens
aggcggtgtgragcaacatgc

SEQ ID NO: 33260 - DNA, 21 bp, Homo sapiens
aggagatgatygagagcatcg

SEQ ID NO: 33261 - DNA, 21 bp, Homo sapiens
gtgtttgtatrttaaggataa

SEQ ID NO: 33262 - DNA, 21 bp, Homo sapiens
attttggctcyctgccagccc

SEQ ID NO: 33263 - DNA, 21 bp, Homo sapiens
tagaaaatctraaacacacaa

SEQ ID NO: 33264 - DNA, 21 bp, Homo sapiens
agacacttccrcttttcctgt

SEQ ID NO: 33265 - DNA, 21 bp, Homo sapiens
ttgaagacacyagccaggctc

SEQ ID NO: 33266 - DNA, 21 bp, Homo sapiens
ccaggctcttrtttttgtttt

SEQ ID NO: 33267 - DNA, 21 bp, Homo sapiens
ccttgtgtggycctggaccag

SEQ ID NO: 33268 - DNA, 21 bp, Homo sapiens
gcagctcacawgggaggggac

SEQ ID NO: 33269 - DNA, 21 bp, Homo sapiens
taagatctcartccaccaaaa

SEQ ID NO: 33270 - DNA, 21 bp, Homo sapiens
ccccccatccwtcctcattgt

SEQ ID NO: 33271 - DNA, 21 bp, Homo sapiens
attttgattcytggtgataaa

SEQ ID NO: 33272 - DNA, 21 bp, Homo sapiens
gcccccaggtraagagatcca

SEQ ID NO: 33273 - DNA, 21 bp, Homo sapiens
ataaaacctgrattcaaatga

SEQ ID NO: 33274 - DNA, 21 bp, Homo sapiens
gggtctgtgtkttggggaaga

SEQ ID NO: 33275 - DNA, 21 bp, Homo sapiens
atatccgagayttacatcaaa

SEQ ID NO: 33276 - DNA, 21 bp, Homo sapiens
gttccatttarcaaccaaaga

SEQ ID NO: 33277 - DNA, 21 bp, Homo sapiens
ccccatggtcrggaacacaga

SEQ ID NO: 33278 - DNA, 21 bp, Homo sapiens
ggatgtgaaarggtgagatcc

SEQ ID NO: 33279 - DNA, 21 bp, Homo sapiens
ctgggaggagrcaggattgca

SEQ ID NO: 33280 - DNA, 21 bp, Homo sapiens
aaaatgagaamccgaaagagg

SEQ ID NO: 33281 - DNA, 21 bp, Homo sapiens
gactcccagtrtacctcttag

SEQ ID NO: 33282 - DNA, 21 bp, Homo sapiens
atctggaaagrggtgatgagg

SEQ ID NO: 33283 - DNA, 21 bp, Homo sapiens
agagttcatcwtaacagactt

SEQ ID NO: 33284 - DNA, 21 bp, Homo sapiens
tggcacctcaratgaaaagtc

SEQ ID NO: 33285 - DNA, 21 bp, Homo sapiens
ccaattacatrtgagtgttta

SEQ ID NO: 33286 - DNA, 21 bp, Homo sapiens
agagttcttcrtctgcaggag

SEQ ID NO: 33287 - DNA, 21 bp, Homo sapiens
tgctcaacacktggggctgtc

SEQ ID NO: 33288 - DNA, 21 bp, Homo sapiens
ccagaagacgsgagagtggaa

SEQ ID NO: 33289 - DNA, 21 bp, Homo sapiens
gttgatgtggkgtcctgagct

SEQ ID NO: 33290 - DNA, 21 bp, Homo sapiens
aggcctcagaygacccctggc

SEQ ID NO: 33291 - DNA, 21 bp, Homo sapiens
cgggatggtamaagcagggat

SEQ ID NO: 33292 - DNA, 21 bp, Homo sapiens
cgtaacttcakgacacctgca

SEQ ID NO: 33293 - DNA, 21 bp, Homo sapiens
gccattctggyactcgacaca

SEQ ID NO: 33294 - DNA, 21 bp, Homo sapiens
atttgcatagrtatcctttct

SEQ ID NO: 33295 - DNA, 21 bp, Homo sapiens
tgttgttttcytttttctttt

SEQ ID NO: 33296 - DNA, 21 bp, Homo sapiens
actagtaggamaaattactta

SEQ ID NO: 33297 - DNA, 21 bp, Homo sapiens
agccttgaatwattctgagtt

SEQ ID NO: 33298 - DNA, 21 bp, Homo sapiens
gatcccgcagrgccagcagat

SEQ ID NO: 33299 - DNA, 21 bp, Homo sapiens
gaagcaggacmcagatgcaaa

SEQ ID NO: 33300 - DNA, 21 bp, Homo sapiens
tgtttagagcrtcttttgcaa

SEQ ID NO: 33301 - DNA, 21 bp, Homo sapiens
tatgggagggraaggcaagag

SEQ ID NO: 33302 - DNA, 21 bp, Homo sapiens
ccccttctagygggagcacca

SEQ ID NO: 33303 - DNA, 21 bp, Homo sapiens
gccccaccagytgtacacaga

SEQ ID NO: 33304 - DNA, 21 bp, Homo sapiens
tctgatcacasgcttctgcac

SEQ ID NO: 33305 - DNA, 21 bp, Homo sapiens
ctgcgatgtgratcacttccc

SEQ ID NO: 33306 - DNA, 21 bp, Homo sapiens
ttaaacaggaraaagagccat

SEQ ID NO: 33307 - DNA, 21 bp, Homo sapiens
ataaagtagcrgtttaataag

SEQ ID NO: 33308 - DNA, 21 bp, Homo sapiens
gctgacgattyaacagtgaca

SEQ ID NO: 33309 - DNA, 21 bp, Homo sapiens
caggtgccagyggtgtacaca

SEQ ID NO: 33310 - DNA, 21 bp, Homo sapiens
tgtaacgcaayggtaagtgtc

SEQ ID NO: 33311 - DNA, 21 bp, Homo sapiens
cagctgaagcyatagcccagg

SEQ ID NO: 33312 - DNA, 21 bp, Homo sapiens
cctgggccgtktctctaaagg

SEQ ID NO: 33313 - DNA, 21 bp, Homo sapiens
atagtcacagstcctggagat

SEQ ID NO: 33314 - DNA, 21 bp, Homo sapiens
aaaatttggarcaacaagaac

SEQ ID NO: 33315 - DNA, 21 bp, Homo sapiens
tgaccatggaracagtctctc

SEQ ID NO: 33316 - DNA, 21 bp, Homo sapiens
gtaatctgtaygtcatagatt

SEQ ID NO: 33317 - DNA, 21 bp, Homo sapiens
tctgaaggccsagagagaaga

SEQ ID NO: 33318 - DNA, 21 bp, Homo sapiens
acacgctaaaycctatagaaa

SEQ ID NO: 33319 - DNA, 21 bp, Homo sapiens
ttcttactgcmatattttaaa

SEQ ID NO: 33320 - DNA, 21 bp, Homo sapiens
gtgctcaggtrgttcctgttc

SEQ ID NO: 33321 - DNA, 21 bp, Homo sapiens
caaggtaatgygatgtattaa

SEQ ID NO: 33322 - DNA, 21 bp, Homo sapiens
gcatttaaggyttttgctcct

SEQ ID NO: 33323 - DNA, 21 bp, Homo sapiens
taggcaaccawtaatctagtg

SEQ ID NO: 33324 - DNA, 21 bp, Homo sapiens
tattttggccmtgcatgtgtt

SEQ ID NO: 33325 - DNA, 21 bp, Homo sapiens
gaccaaagctyaatcagtcct

SEQ ID NO: 33326 - DNA, 21 bp, Homo sapiens
ccacttgtcaygttaaagtaa

SEQ ID NO: 33327 - DNA, 21 bp, Homo sapiens
tttgttttcgytgccattgct

SEQ ID NO: 33328 - DNA, 21 bp, Homo sapiens
ctattggagcygagaaagaca

SEQ ID NO: 33329 - DNA, 21 bp, Homo sapiens
tgagtaaaagmagaaacacaa

SEQ ID NO: 33330 - DNA, 21 bp, Homo sapiens
ttaatctgttyaactaaatgg

SEQ ID NO: 33331 - DNA, 21 bp, Homo sapiens
aaaattaacawacaaatgaca

SEQ ID NO: 33332 - DNA, 21 bp, Homo sapiens
tgatctcctcyccttgtgtgt

SEQ ID NO: 33333 - DNA, 21 bp, Homo sapiens
agtagacaccrgagactatga

SEQ ID NO: 33334 - DNA, 21 bp, Homo sapiens
tatctaattgytgaccaccca

SEQ ID NO: 33335 - DNA, 21 bp, Homo sapiens
ggtatgaagtratatacacac

SEQ ID NO: 33336 - DNA, 21 bp, Homo sapiens
ttatgtatgtrcatgtgttat

SEQ ID NO: 33337 - DNA, 21 bp, Homo sapiens
gtatggtagayacatggctcc

SEQ ID NO: 33338 - DNA, 21 bp, Homo sapiens
tggcaattgckgtagtcagga

SEQ ID NO: 33339 - DNA, 21 bp, Homo sapiens
ttcaaatcaamcttactcaga

SEQ ID NO: 33340 - DNA, 21 bp, Homo sapiens
gaaaatgtttmaattattaag

SEQ ID NO: 33341 - DNA, 21 bp, Homo sapiens
caattagccayataaaatcat

SEQ ID NO: 33342 - DNA, 21 bp, Homo sapiens
ttaagaaaggwgtgtagtaga

SEQ ID NO: 33343 - DNA, 21 bp, Homo sapiens
gaaatagctawgtcaaaaggg

SEQ ID NO: 33344 - DNA, 21 bp, Homo sapiens
tctaagttgtrtcagtttata

SEQ ID NO: 33345 - DNA, 21 bp, Homo sapiens
catggttgctyactgccttat

SEQ ID NO: 33346 - DNA, 21 bp, Homo sapiens
atgcgatgtcraagtagggca

SEQ ID NO: 33347 - DNA, 21 bp, Homo sapiens
tgcttaaagtmtcaacttaag

SEQ ID NO: 33348 - DNA, 21 bp, Homo sapiens
atcttttctastggaagaaca

SEQ ID NO: 33349 - DNA, 21 bp, Homo sapiens
attttatactsctactaacag

SEQ ID NO: 33350 - DNA, 21 bp, Homo sapiens
aaagaggaaayaagttttgtc

SEQ ID NO: 33351 - DNA, 21 bp, Homo sapiens
tgaatccctcrtttctctaaa

SEQ ID NO: 33352 - DNA, 21 bp, Homo sapiens
cctggaccacrgagaaaattc

SEQ ID NO: 33353 - DNA, 21 bp, Homo sapiens
ttaaacagtayggtttaaagt

SEQ ID NO: 33354 - DNA, 21 bp, Homo sapiens
agggttttaakattaatattc

SEQ ID NO: 33355 - DNA, 21 bp, Homo sapiens
attgggttttraatataattt

SEQ ID NO: 33356 - DNA, 21 bp, Homo sapiens
tctacccagaycttcccacat

SEQ ID NO: 33357 - DNA, 21 bp, Homo sapiens
tggcacagttycacaattgtc

SEQ ID NO: 33358 - DNA, 21 bp, Homo sapiens
atttatcaaayccatcaacct

SEQ ID NO: 33359 - DNA, 21 bp, Homo sapiens
tttcaaaattmtttttttgtc

SEQ ID NO: 33360 - DNA, 21 bp, Homo sapiens
tctctgcttayctgaccacct

SEQ ID NO: 33361 - DNA, 21 bp, Homo sapiens
aaatgtacatstactctgaag

SEQ ID NO: 33362 - DNA, 21 bp, Homo sapiens
cagatatttgygaatatgtga

SEQ ID NO: 33363 - DNA, 21 bp, Homo sapiens
ccactttttcytcggtatgtc

SEQ ID NO: 33364 - DNA, 21 bp, Homo sapiens
agctgagcagytttcctcgtc

SEQ ID NO: 33365 - DNA, 21 bp, Homo sapiens
gttttgtacasctgatttaaa

SEQ ID NO: 33366 - DNA, 21 bp, Homo sapiens
agcaggcacaraaagattaga

SEQ ID NO: 33367 - DNA, 21 bp, Homo sapiens
gctaaactaayggaaacaccc

SEQ ID NO: 33368 - DNA, 21 bp, Homo sapiens
ataactttttytgtattaact

SEQ ID NO: 33369 - DNA, 21 bp, Homo sapiens
tacctgttccyccgttgtatc

SEQ ID NO: 33370 - DNA, 21 bp, Homo sapiens
atcatcgactrtgctttgtgg

SEQ ID NO: 33371 - DNA, 21 bp, Homo sapiens
agcagcatgaytgaatcacac

SEQ ID NO: 33372 - DNA, 21 bp, Homo sapiens
ataatagcacratttcaaatg

SEQ ID NO: 33373 - DNA, 21 bp, Homo sapiens
attacatgaaygtttcatagt

SEQ ID NO: 33374 - DNA, 21 bp, Homo sapiens
aaataccaagmgaaagttctc

SEQ ID NO: 33375 - DNA, 21 bp, Homo sapiens
agattttcagwttagggatgc

SEQ ID NO: 33376 - DNA, 21 bp, Homo sapiens
ttgagttgtcygggggttgaa

SEQ ID NO: 33377 - DNA, 21 bp, Homo sapiens
aagccatatgyattaaggtat

SEQ ID NO: 33378 - DNA, 21 bp, Homo sapiens
aactgttttcrgtacttttat

SEQ ID NO: 33379 - DNA, 21 bp, Homo sapiens
tatattaaatrtcaacatttt

SEQ ID NO: 33380 - DNA, 21 bp, Homo sapiens
gtgtcttcacyggagttgtgc

SEQ ID NO: 33381 - DNA, 21 bp, Homo sapiens
ctgactaggayataatattca

SEQ ID NO: 33382 - DNA, 21 bp, Homo sapiens
aatcaaaaagwtaaaatgggt

SEQ ID NO: 33383 - DNA, 21 bp, Homo sapiens
aaaggttctgratattctgtt

SEQ ID NO: 33384 - DNA, 21 bp, Homo sapiens
tgctgctcccrggtccttcct

SEQ ID NO: 33385 - DNA, 21 bp, Homo sapiens
catacttttayttataatttt

SEQ ID NO: 33386 - DNA, 21 bp, Homo sapiens
agcaaaaataytggtttttaa

SEQ ID NO: 33387 - DNA, 21 bp, Homo sapiens
aagtataatgygtgcagttgc

SEQ ID NO: 33388 - DNA, 21 bp, Homo sapiens
ggtaatatacycgtagataag

SEQ ID NO: 33389 - DNA, 21 bp, Homo sapiens
aagttcaaaawatattaattt

SEQ ID NO: 33390 - DNA, 21 bp, Homo sapiens
aaggttaaatrcatttttatt

SEQ ID NO: 33391 - DNA, 21 bp, Homo sapiens
tttccgtgtawtatcttgggt

SEQ ID NO: 33392 - DNA, 21 bp, Homo sapiens
aattagtgtcrtgcattaaat

SEQ ID NO: 33393 - DNA, 21 bp, Homo sapiens
gcaacatgctmcatatgtcat

SEQ ID NO: 33394 - DNA, 21 bp, Homo sapiens
aaaaacttacyaatttttaga

SEQ ID NO: 33395 - DNA, 21 bp, Homo sapiens
tgtgattgctrgatcatatgg

SEQ ID NO: 33396 - DNA, 21 bp, Homo sapiens
ttatgaatttytatttttctg

SEQ ID NO: 33397 - DNA, 21 bp, Homo sapiens
tgagtgctagytatgataatg

SEQ ID NO: 33398 - DNA, 21 bp, Homo sapiens
gcttatcaagytccttctatg

SEQ ID NO: 33399 - DNA, 21 bp, Homo sapiens
tcctttactcrtaatccatct

SEQ ID NO: 33400 - DNA, 21 bp, Homo sapiens
gtaaccccaawatcaaaattc

SEQ ID NO: 33401 - DNA, 21 bp, Homo sapiens
tcaaaagaccyatctaggtgt

SEQ ID NO: 33402 - DNA, 21 bp, Homo sapiens
gtaaaactgartgtatttagc

SEQ ID NO: 33403 - DNA, 21 bp, Homo sapiens
tgacagtggtrtgatggtggg

SEQ ID NO: 33404 - DNA, 21 bp, Homo sapiens
aataaacagaytatagaggat

SEQ ID NO: 33405 - DNA, 21 bp, Homo sapiens
atccatgaggmttttttagcc

SEQ ID NO: 33406 - DNA, 21 bp, Homo sapiens
ttctatctgtycattaaaaaa

SEQ ID NO: 33407 - DNA, 21 bp, Homo sapiens
tatttgagaarcaattattat

SEQ ID NO: 33408 - DNA, 21 bp, Homo sapiens
ttcttttctgkcaatattttc

SEQ ID NO: 33409 - DNA, 21 bp, Homo sapiens
atttaattaayatttttgatg

SEQ ID NO: 33410 - DNA, 21 bp, Homo sapiens
tcatggttgtwctggagagca

SEQ ID NO: 33411 - DNA, 21 bp, Homo sapiens
tcacattattraggtaggtta

SEQ ID NO: 33412 - DNA, 21 bp, Homo sapiens
acaacagaccwcctaagactc

SEQ ID NO: 33413 - DNA, 21 bp, Homo sapiens
atttggggaaytctcagagtt

SEQ ID NO: 33414 - DNA, 21 bp, Homo sapiens
ttacacttaaktttcaaaaat

SEQ ID NO: 33415 - DNA, 21 bp, Homo sapiens
taggctcgttratagatttct

SEQ ID NO: 33416 - DNA, 21 bp, Homo sapiens
gctatagtaaygtgtacatcc

SEQ ID NO: 33417 - DNA, 21 bp, Homo sapiens
aatgtaacaamacatccccaa

SEQ ID NO: 33418 - DNA, 21 bp, Homo sapiens
aatttaacctktaaaaaattg

SEQ ID NO: 33419 - DNA, 21 bp, Homo sapiens
tttcgcaactrtgggcatatt

SEQ ID NO: 33420 - DNA, 21 bp, Homo sapiens
tctacagaggsgcaaaactga

SEQ ID NO: 33421 - DNA, 21 bp, Homo sapiens
tagacctataygtgccattgc

SEQ ID NO: 33422 - DNA, 21 bp, Homo sapiens
ttgcttattcygatcttagtg

SEQ ID NO: 33423 - DNA, 21 bp, Homo sapiens
ccacttttctmgggaaagggc

SEQ ID NO: 33424 - DNA, 21 bp, Homo sapiens
acaacctcgcrctagtaattt

SEQ ID NO: 33425 - DNA, 21 bp, Homo sapiens
aaacagttaaraagacagaac

SEQ ID NO: 33426 - DNA, 21 bp, Homo sapiens
acctgccccckttcccacccc

SEQ ID NO: 33427 - DNA, 21 bp, Homo sapiens
atggctatgcrtataatatgt

SEQ ID NO: 33428 - DNA, 21 bp, Homo sapiens
agtattttagrggcacctgct

SEQ ID NO: 33429 - DNA, 21 bp, Homo sapiens
gtatttcaggrtgccacaaac

SEQ ID NO: 33430 - DNA, 21 bp, Homo sapiens
ccattaagttyaccctgtgta

SEQ ID NO: 33431 - DNA, 21 bp, Homo sapiens
tcaaatttctsttatgggaac

SEQ ID NO: 33432 - DNA, 21 bp, Homo sapiens
ctgagtttacraaattaattc

SEQ ID NO: 33433 - DNA, 21 bp, Homo sapiens
tataacataartgtcatgcca

SEQ ID NO: 33434 - DNA, 21 bp, Homo sapiens
gttaaactggraaaaggaaca

SEQ ID NO: 33435 - DNA, 21 bp, Homo sapiens
tccctggaccrttaacacata

SEQ ID NO: 33436 - DNA, 21 bp, Homo sapiens
gttaactttaraagaatatta

SEQ ID NO: 33437 - DNA, 21 bp, Homo sapiens
tccaaatggcrgtggctctgt

SEQ ID NO: 33438 - DNA, 21 bp, Homo sapiens
atacatgtgarggagaaagat

SEQ ID NO: 33439 - DNA, 21 bp, Homo sapiens
attttgtggaygtgagaacag

SEQ ID NO: 33440 - DNA, 21 bp, Homo sapiens
gcaagctgaargggatggctt

SEQ ID NO: 33441 - DNA, 21 bp, Homo sapiens
cactcatacartatagcacca

SEQ ID NO: 33442 - DNA, 21 bp, Homo sapiens
ccaaataccamttagagctac

SEQ ID NO: 33443 - DNA, 21 bp, Homo sapiens
gtttctttctrgtattttggg

SEQ ID NO: 33444 - DNA, 21 bp, Homo sapiens
aagtaggaagragcttagcct

SEQ ID NO: 33445 - DNA, 21 bp, Homo sapiens
caatggagagrgccagagatc

SEQ ID NO: 33446 - DNA, 21 bp, Homo sapiens
ctaaaatgcayggtttaaata

SEQ ID NO: 33447 - DNA, 21 bp, Homo sapiens
ctatgtaaccyctctcatatc

SEQ ID NO: 33448 - DNA, 21 bp, Homo sapiens
tatgattatcrttcacacagc

SEQ ID NO: 33449 - DNA, 21 bp, Homo sapiens
acatacttatrtaggtcctaa

SEQ ID NO: 33450 - DNA, 21 bp, Homo sapiens
gttttcagcaygaaaatcgta

SEQ ID NO: 33451 - DNA, 21 bp, Homo sapiens
tagagaaaacyttaacccatt

SEQ ID NO: 33452 - DNA, 21 bp, Homo sapiens
gggatggagcraactttctga

SEQ ID NO: 33453 - DNA, 21 bp, Homo sapiens
atgagtctccstggggtaaaa

SEQ ID NO: 33454 - DNA, 21 bp, Homo sapiens
gctaggctcayttgttggaat

SEQ ID NO: 33455 - DNA, 21 bp, Homo sapiens
cccaagaactkcagtttcatt

SEQ ID NO: 33456 - DNA, 21 bp, Homo sapiens
gttacttggargattgaaaat

SEQ ID NO: 33457 - DNA, 21 bp, Homo sapiens
gtgaactaaartaaagattgg

SEQ ID NO: 33458 - DNA, 21 bp, Homo sapiens
aaactgctgargtttgggatt

SEQ ID NO: 33459 - DNA, 21 bp, Homo sapiens
cttggcacacrgtaaaataaa

SEQ ID NO: 33460 - DNA, 21 bp, Homo sapiens
aaaccacttaygcagctttag

SEQ ID NO: 33461 - DNA, 21 bp, Homo sapiens
agaaaacactsttaatcacaa

SEQ ID NO: 33462 - DNA, 21 bp, Homo sapiens
catcaggttgygtcacttagt

SEQ ID NO: 33463 - DNA, 21 bp, Homo sapiens
actccctcgtragtgtaacca

SEQ ID NO: 33464 - DNA, 21 bp, Homo sapiens
ttttgggccaytaatagctca

SEQ ID NO: 33465 - DNA, 21 bp, Homo sapiens
ttcccactcawggtcaggtca

SEQ ID NO: 33466 - DNA, 21 bp, Homo sapiens
gagaatgaagrtttaaggaaa

SEQ ID NO: 33467 - DNA, 21 bp, Homo sapiens
caaggaaatayatacttacaa

SEQ ID NO: 33468 - DNA, 21 bp, Homo sapiens
aaataaataawtttaacaagt

SEQ ID NO: 33469 - DNA, 21 bp, Homo sapiens
acaggaaaatrtatgagtata

SEQ ID NO: 33470 - DNA, 21 bp, Homo sapiens
gatatatgtayatatgactct

SEQ ID NO: 33471 - DNA, 21 bp, Homo sapiens
atcgaaagtcragggaaaata

SEQ ID NO: 33472 - DNA, 21 bp, Homo sapiens
ttaaaaattaycattgaaatt

SEQ ID NO: 33473 - DNA, 21 bp, Homo sapiens
atttcagtgcygagataattt

SEQ ID NO: 33474 - DNA, 21 bp, Homo sapiens
gtgtggttacmttttagacaa

SEQ ID NO: 33475 - DNA, 21 bp, Homo sapiens
acctaaattcrtcctattgga

SEQ ID NO: 33476 - DNA, 21 bp, Homo sapiens
gaccaagcttstccaacctgt

SEQ ID NO: 33477 - DNA, 21 bp, Homo sapiens
tggaggtcagycattcactgt

SEQ ID NO: 33478 - DNA, 21 bp, Homo sapiens
gtgccatggtrgtttgctgct

SEQ ID NO: 33479 - DNA, 21 bp, Homo sapiens
tctatgtgacmaatttatcta

SEQ ID NO: 33480 - DNA, 21 bp, Homo sapiens
gaccctgggayaatgtattaa

SEQ ID NO: 33481 - DNA, 21 bp, Homo sapiens
tctttaatatrtgacgagtac

SEQ ID NO: 33482 - DNA, 21 bp, Homo sapiens
tacttgtgccytacgttggca

SEQ ID NO: 33483 - DNA, 21 bp, Homo sapiens
gatttacatgrgcaattttat

SEQ ID NO: 33484 - DNA, 21 bp, Homo sapiens
atatcaaaagygcactgacgc

SEQ ID NO: 33485 - DNA, 21 bp, Homo sapiens
agtgaatgatrtcttcccctc

SEQ ID NO: 33486 - DNA, 21 bp, Homo sapiens
agccattagcmacataaagca

SEQ ID NO: 33487 - DNA, 21 bp, Homo sapiens
tgttctcaacrtgcacctcct

SEQ ID NO: 33488 - DNA, 21 bp, Homo sapiens
ttaaatgtctrgaaatagaga

SEQ ID NO: 33489 - DNA, 21 bp, Homo sapiens
ctgagcaacakgcctgtctca

SEQ ID NO: 33490 - DNA, 21 bp, Homo sapiens
gggtgattttrcttttccaag

SEQ ID NO: 33491 - DNA, 21 bp, Homo sapiens
tattacacttycttttccatt

SEQ ID NO: 33492 - DNA, 21 bp, Homo sapiens
gaagaagaaaygtaaaaatcc

SEQ ID NO: 33493 - DNA, 21 bp, Homo sapiens
tcaggggttartaaaaagtaa

SEQ ID NO: 33494 - DNA, 21 bp, Homo sapiens
aaggaatcatsaatggggctt

SEQ ID NO: 33495 - DNA, 21 bp, Homo sapiens
catctctgcckcttgagagag

SEQ ID NO: 33496 - DNA, 21 bp, Homo sapiens
tcgaaatggascgtgcgttcc

SEQ ID NO: 33497 - DNA, 21 bp, Homo sapiens
actcaagatakcaggtttggt

SEQ ID NO: 33498 - DNA, 21 bp, Homo sapiens
caaatgcattsgagcagaaac

SEQ ID NO: 33499 - DNA, 21 bp, Homo sapiens
ccagccgagargacaaagcaa

SEQ ID NO: 33500 - DNA, 21 bp, Homo sapiens
gacagatcccrtgactattcc

SEQ ID NO: 33501 - DNA, 21 bp, Homo sapiens
gtgaaaggaaygtgcctgcta

SEQ ID NO: 33502 - DNA, 21 bp, Homo sapiens
atgaaattcaygtcctaaaac

SEQ ID NO: 33503 - DNA, 21 bp, Homo sapiens
actccaaaggrggctcatgaa

SEQ ID NO: 33504 - DNA, 21 bp, Homo sapiens
tggcaaaaggyaggtgcccac

SEQ ID NO: 33505 - DNA, 21 bp, Homo sapiens
tttaaaatcarttcaaaaaac

SEQ ID NO: 33506 - DNA, 21 bp, Homo sapiens
tgagttttgcrtgttgcgttc

SEQ ID NO: 33507 - DNA, 21 bp, Homo sapiens
gcttaaaatckcaccctgcat

SEQ ID NO: 33508 - DNA, 21 bp, Homo sapiens
ataaagatgartattaacaac

SEQ ID NO: 33509 - DNA, 21 bp, Homo sapiens
aggattatttrtgtgttttta

SEQ ID NO: 33510 - DNA, 21 bp, Homo sapiens
ccctgacaatrtggttactta

SEQ ID NO: 33511 - DNA, 21 bp, Homo sapiens
gtaggatcagkaggatctcac

SEQ ID NO: 33512 - DNA, 21 bp, Homo sapiens
actgattgatwgaaatgggaa

SEQ ID NO: 33513 - DNA, 21 bp, Homo sapiens
ttatagccatkgcctagtctg

SEQ ID NO: 33514 - DNA, 21 bp, Homo sapiens
ttctaagtgcsttttgattca

SEQ ID NO: 33515 - DNA, 21 bp, Homo sapiens
tgaaagttgcracactgaaaa

SEQ ID NO: 33516 - DNA, 21 bp, Homo sapiens
acccaggcacrtcataatcaa

SEQ ID NO: 33517 - DNA, 21 bp, Homo sapiens
tttttttaaawtctgcagccc

SEQ ID NO: 33518 - DNA, 21 bp, Homo sapiens
aggaaagtaarggatgctggg

SEQ ID NO: 33519 - DNA, 21 bp, Homo sapiens
agggcacagaycctggggcca

SEQ ID NO: 33520 - DNA, 21 bp, Homo sapiens
tcacatgaagwtgtgggcttg

SEQ ID NO: 33521 - DNA, 21 bp, Homo sapiens
actgctgcccrtaactggtaa

SEQ ID NO: 33522 - DNA, 21 bp, Homo sapiens
cccaagcaagrttctgtttct

SEQ ID NO: 33523 - DNA, 21 bp, Homo sapiens
atactttatayatggatagat

SEQ ID NO: 33524 - DNA, 21 bp, Homo sapiens
gaaacactgayacagaggatg

SEQ ID NO: 33525 - DNA, 21 bp, Homo sapiens
ttgccttaagrctaggcttag

SEQ ID NO: 33526 - DNA, 21 bp, Homo sapiens
taagtattgtrtcttcaaaat

SEQ ID NO: 33527 - DNA, 21 bp, Homo sapiens
gaagttcttaytgtccatcta

SEQ ID NO: 33528 - DNA, 21 bp, Homo sapiens
tgctaatcaaytccctgggct

SEQ ID NO: 33529 - DNA, 21 bp, Homo sapiens
gccattcaggyagagtttcag

SEQ ID NO: 33530 - DNA, 21 bp, Homo sapiens
ttgttctttargacatcatct

SEQ ID NO: 33531 - DNA, 21 bp, Homo sapiens
caattgaagtrgaagcttgat

SEQ ID NO: 33532 - DNA, 21 bp, Homo sapiens
ctctgagcctyagtttctcta

SEQ ID NO: 33533 - DNA, 21 bp, Homo sapiens
aaactctccaygcccacatgg

SEQ ID NO: 33534 - DNA, 21 bp, Homo sapiens
ttttatttaawcttcacaata

SEQ ID NO: 33535 - DNA, 21 bp, Homo sapiens
attaaagtctratttgaagga

SEQ ID NO: 33536 - DNA, 21 bp, Homo sapiens
acaggatccasaaggtaatct

SEQ ID NO: 33537 - DNA, 21 bp, Homo sapiens
atatgttcagkatatttgcta

SEQ ID NO: 33538 - DNA, 21 bp, Homo sapiens
taagaggcacytcctctgtcc

SEQ ID NO: 33539 - DNA, 21 bp, Homo sapiens
ttatgtttctrataatccatg

SEQ ID NO: 33540 - DNA, 21 bp, Homo sapiens
tattcttctcyctcccacctg

SEQ ID NO: 33541 - DNA, 21 bp, Homo sapiens
cccatgagtayagaaaacaag

SEQ ID NO: 33542 - DNA, 21 bp, Homo sapiens
aaatgttcaarttcttaaaca

SEQ ID NO: 33543 - DNA, 21 bp, Homo sapiens
tctttctgaawggcactgaac

SEQ ID NO: 33544 - DNA, 21 bp, Homo sapiens
gaaaactccaytactaggaaa

SEQ ID NO: 33545 - DNA, 21 bp, Homo sapiens
tgctagtaggsaaaaatctta

SEQ ID NO: 33546 - DNA, 21 bp, Homo sapiens
caaaaagtttygggttgattc

SEQ ID NO: 33547 - DNA, 21 bp, Homo sapiens
ctgcaatcaargtgtcaggca

SEQ ID NO: 33548 - DNA, 21 bp, Homo sapiens
tagaagttaamtttgccacct

SEQ ID NO: 33549 - DNA, 21 bp, Homo sapiens
agagagccagytttcatttaa

SEQ ID NO: 33550 - DNA, 21 bp, Homo sapiens
ggaataaatakagaggcatac

SEQ ID NO: 33551 - DNA, 21 bp, Homo sapiens
tgcatagacaygttgttgaag

SEQ ID NO: 33552 - DNA, 21 bp, Homo sapiens
tgagaatatcrgggctgaaaa

SEQ ID NO: 33553 - DNA, 21 bp, Homo sapiens
agacttattaygtcaatcata

SEQ ID NO: 33554 - DNA, 21 bp, Homo sapiens
gtaagaattgyccctgtctga

SEQ ID NO: 33555 - DNA, 21 bp, Homo sapiens
cagaaacaaamgcccaggaat

SEQ ID NO: 33556 - DNA, 21 bp, Homo sapiens
aggttaagtaycatatacaag

SEQ ID NO: 33557 - DNA, 21 bp, Homo sapiens
ctgctttactyttgtgtgcag

SEQ ID NO: 33558 - DNA, 21 bp, Homo sapiens
agttaagatayaggttcctga

SEQ ID NO: 33559 - DNA, 21 bp, Homo sapiens
cttttaatgayttacataacc

SEQ ID NO: 33560 - DNA, 21 bp, Homo sapiens
ttgctgagttraaattcatga

SEQ ID NO: 33561 - DNA, 21 bp, Homo sapiens
gttgagatacragaaatcact

SEQ ID NO: 33562 - DNA, 21 bp, Homo sapiens
gaatgctgctwaaatggctat

SEQ ID NO: 33563 - DNA, 21 bp, Homo sapiens
ctccctagtgyctacctgcct

SEQ ID NO: 33564 - DNA, 21 bp, Homo sapiens
tgtggtatagraccgtggtgt

SEQ ID NO: 33565 - DNA, 21 bp, Homo sapiens
attatgtttcytttcctataa

SEQ ID NO: 33566 - DNA, 21 bp, Homo sapiens
acactgcaatygtgtctatgc

SEQ ID NO: 33567 - DNA, 21 bp, Homo sapiens
tggctgtactmatttgcattc

SEQ ID NO: 33568 - DNA, 21 bp, Homo sapiens
gatgaccttcrgactagagac

SEQ ID NO: 33569 - DNA, 21 bp, Homo sapiens
tgctttaataragaaaagtga

SEQ ID NO: 33570 - DNA, 21 bp, Homo sapiens
gtctggtcatmagaaaacatc

SEQ ID NO: 33571 - DNA, 21 bp, Homo sapiens
gtgcatgtagyttaccgcaag

SEQ ID NO: 33572 - DNA, 21 bp, Homo sapiens
agtaacttgtyagaagtttat

SEQ ID NO: 33573 - DNA, 21 bp, Homo sapiens
ggatgcacacyacaggagagt

SEQ ID NO: 33574 - DNA, 21 bp, Homo sapiens
tccatctgagrcccaaagtgt

SEQ ID NO: 33575 - DNA, 21 bp, Homo sapiens
ttctgacaccrtgtacccccc

SEQ ID NO: 33576 - DNA, 21 bp, Homo sapiens
tgccttttttytcacttaata

SEQ ID NO: 33577 - DNA, 21 bp, Homo sapiens
tcctttatgtsatttatcttt

SEQ ID NO: 33578 - DNA, 21 bp, Homo sapiens
gtataacacamagatataaaa

SEQ ID NO: 33579 - DNA, 21 bp, Homo sapiens
agggcttactrtttgccaagg

SEQ ID NO: 33580 - DNA, 21 bp, Homo sapiens
ttggattttgyctatgagtga

SEQ ID NO: 33581 - DNA, 21 bp, Homo sapiens
ttgtgtatctmacttctgatc

SEQ ID NO: 33582 - DNA, 21 bp, Homo sapiens
gtaaagacaarggagaatagc

SEQ ID NO: 33583 - DNA, 21 bp, Homo sapiens
actgtgaatgycatgtacctt

SEQ ID NO: 33584 - DNA, 21 bp, Homo sapiens
aaatagtggaygcttatccag

SEQ ID NO: 33585 - DNA, 21 bp, Homo sapiens
cctcttttatrgagttcattg

SEQ ID NO: 33586 - DNA, 21 bp, Homo sapiens
ggaaataagamaaaaatcaaa

SEQ ID NO: 33587 - DNA, 21 bp, Homo sapiens
ttaacctttgmtttgattgac

SEQ ID NO: 33588 - DNA, 21 bp, Homo sapiens
agtctattaasattcatgtat

SEQ ID NO: 33589 - DNA, 21 bp, Homo sapiens
tgtatgcctcstaactgatag

SEQ ID NO: 33590 - DNA, 21 bp, Homo sapiens
tacaagtgttwtatccgtctg

SEQ ID NO: 33591 - DNA, 21 bp, Homo sapiens
ataacagaackgtgtgtcctc

SEQ ID NO: 33592 - DNA, 21 bp, Homo sapiens
tttgctaaccscaaccactat

SEQ ID NO: 33593 - DNA, 21 bp, Homo sapiens
gtgtttgcaakccctgcggga

SEQ ID NO: 33594 - DNA, 21 bp, Homo sapiens
tttggaaaaaktgtatgtgct

SEQ ID NO: 33595 - DNA, 21 bp, Homo sapiens
tactatgggakcgtatgctca

SEQ ID NO: 33596 - DNA, 21 bp, Homo sapiens
aaaaggggtaytaaaggctat

SEQ ID NO: 33597 - DNA, 21 bp, Homo sapiens
attatactgayggtttgtata

SEQ ID NO: 33598 - DNA, 21 bp, Homo sapiens
gttggggaggsggcattcttt

SEQ ID NO: 33599 - DNA, 21 bp, Homo sapiens
tgcctttcttkgataacgctt

SEQ ID NO: 33600 - DNA, 21 bp, Homo sapiens
ggagggaaggsctaccctggc

SEQ ID NO: 33601 - DNA, 21 bp, Homo sapiens
acaagtggacrttagcggggt

SEQ ID NO: 33602 - DNA, 21 bp, Homo sapiens
catggccaggrccatcatctg

SEQ ID NO: 33603 - DNA, 21 bp, Homo sapiens
gaggaggtgcwgcagtccggc

SEQ ID NO: 33604 - DNA, 21 bp, Homo sapiens
gactattgtaytttaggttct

SEQ ID NO: 33605 - DNA, 21 bp, Homo sapiens
agaaaaaaaayttatataata

SEQ ID NO: 33606 - DNA, 21 bp, Homo sapiens
ttcagtgcatktactgtctaa

SEQ ID NO: 33607 - DNA, 21 bp, Homo sapiens
ggttttgtctstattactgga

SEQ ID NO: 33608 - DNA, 21 bp, Homo sapiens
gtcccgttgtrttaaagacat

SEQ ID NO: 33609 - DNA, 21 bp, Homo sapiens
attctaaaagytgctttgcca

SEQ ID NO: 33610 - DNA, 21 bp, Homo sapiens
tagctaatgayaactgcagaa

SEQ ID NO: 33611 - DNA, 21 bp, Homo sapiens
tgtatttatcrtgtcaatgag

SEQ ID NO: 33612 - DNA, 21 bp, Homo sapiens
gctgacaaacrtaatgggatg

SEQ ID NO: 33613 - DNA, 21 bp, Homo sapiens
atagtggaagycttccaactt

SEQ ID NO: 33614 - DNA, 21 bp, Homo sapiens
ttccatcatcyactgggttag

SEQ ID NO: 33615 - DNA, 21 bp, Homo sapiens
aaacaaaaaaragaaagaaat

SEQ ID NO: 33616 - DNA, 21 bp, Homo sapiens
atcttactgtrtgtatcttac

SEQ ID NO: 33617 - DNA, 21 bp, Homo sapiens
agtaaaatctmaagttagaga

SEQ ID NO: 33618 - DNA, 21 bp, Homo sapiens
cattttggggyacagcagggt

SEQ ID NO: 33619 - DNA, 21 bp, Homo sapiens
cctatcttcayctttttaagc

SEQ ID NO: 33620 - DNA, 21 bp, Homo sapiens
tcagaacttamacaaagtaat

SEQ ID NO: 33621 - DNA, 21 bp, Homo sapiens
atctagatttytgtcgattca

SEQ ID NO: 33622 - DNA, 21 bp, Homo sapiens
ttgagctcacrgggaagctcc

SEQ ID NO: 33623 - DNA, 21 bp, Homo sapiens
ccgtactggcratattagctc

SEQ ID NO: 33624 - DNA, 21 bp, Homo sapiens
ttcacttttgsaattgagaaa

SEQ ID NO: 33625 - DNA, 21 bp, Homo sapiens
agacactccargtatggtcca

SEQ ID NO: 33626 - DNA, 21 bp, Homo sapiens
ccacacaagaktgtgatatga

SEQ ID NO: 33627 - DNA, 21 bp, Homo sapiens
acctcctcccrttgaatgagg

SEQ ID NO: 33628 - DNA, 21 bp, Homo sapiens
tttattactgwttcagttttg

SEQ ID NO: 33629 - DNA, 21 bp, Homo sapiens
tcagaaatagrttgtacagct

SEQ ID NO: 33630 - DNA, 21 bp, Homo sapiens
atgcctactaygaactagaca

SEQ ID NO: 33631 - DNA, 21 bp, Homo sapiens
tttgagttgcrtaatctggcc

SEQ ID NO: 33632 - DNA, 21 bp, Homo sapiens
cctgctcttcwggaaaagctc

SEQ ID NO: 33633 - DNA, 21 bp, Homo sapiens
ctgttttctgsggagatgtta

SEQ ID NO: 33634 - DNA, 21 bp, Homo sapiens
tcacatttaaraaaaaatgca

SEQ ID NO: 33635 - DNA, 21 bp, Homo sapiens
ggatttgcttyattcaaatat

SEQ ID NO: 33636 - DNA, 21 bp, Homo sapiens
ttttaatcctygggcataaga

SEQ ID NO: 33637 - DNA, 21 bp, Homo sapiens
attcttttaayggacatatgt

SEQ ID NO: 33638 - DNA, 21 bp, Homo sapiens
agtgattccaygtgccacatc

SEQ ID NO: 33639 - DNA, 21 bp, Homo sapiens
ttactaaagartacacatttc

SEQ ID NO: 33640 - DNA, 21 bp, Homo sapiens
tcactcttgcygggatgacta

SEQ ID NO: 33641 - DNA, 21 bp, Homo sapiens
atttatgaacraatatcattg

SEQ ID NO: 33642 - DNA, 21 bp, Homo sapiens
agttacttttygattgatata

SEQ ID NO: 33643 - DNA, 21 bp, Homo sapiens
tataataatamaaaagacatg

SEQ ID NO: 33644 - DNA, 21 bp, Homo sapiens
atgtcaaccakaagtctgttc

SEQ ID NO: 33645 - DNA, 21 bp, Homo sapiens
tgggttaaacktgaggcactt

SEQ ID NO: 33646 - DNA, 21 bp, Homo sapiens
ttcctgaaatmttatactaaa

SEQ ID NO: 33647 - DNA, 21 bp, Homo sapiens
atgtggaaggyctattgttcg

SEQ ID NO: 33648 - DNA, 21 bp, Homo sapiens
cagagatgaamgtgtgtcagc

SEQ ID NO: 33649 - DNA, 21 bp, Homo sapiens
tggtgactttktacatggttt

SEQ ID NO: 33650 - DNA, 21 bp, Homo sapiens
tctaagtcagygaagaaattt

SEQ ID NO: 33651 - DNA, 21 bp, Homo sapiens
aaaggcagggmaattcaggta

SEQ ID NO: 33652 - DNA, 21 bp, Homo sapiens
tatttgtgtaycatgtgccat

SEQ ID NO: 33653 - DNA, 21 bp, Homo sapiens
tttaatttttkgtctgagagg

SEQ ID NO: 33654 - DNA, 21 bp, Homo sapiens
ctattcaagtrttgaaaaaat

SEQ ID NO: 33655 - DNA, 21 bp, Homo sapiens
gttagacccayggcctaccta

SEQ ID NO: 33656 - DNA, 21 bp, Homo sapiens
ccactaccctsctatgggcag

SEQ ID NO: 33657 - DNA, 21 bp, Homo sapiens
cgaagggttaytaaacataga

SEQ ID NO: 33658 - DNA, 21 bp, Homo sapiens
gtttaatccarttctcgattt

SEQ ID NO: 33659 - DNA, 21 bp, Homo sapiens
agtgcgctaaratcacaagcc

SEQ ID NO: 33660 - DNA, 21 bp, Homo sapiens
agctgtttggstatctcttag

SEQ ID NO: 33661 - DNA, 21 bp, Homo sapiens
ggtaaattctygcatgggaac

SEQ ID NO: 33662 - DNA, 21 bp, Homo sapiens
cacatatttayagtccataac

SEQ ID NO: 33663 - DNA, 21 bp, Homo sapiens
gaaagtccacytcacattaga

SEQ ID NO: 33664 - DNA, 21 bp, Homo sapiens
ttgccccaccycagaggtaag

SEQ ID NO: 33665 - DNA, 21 bp, Homo sapiens
ggcatatgttkcataactttt

SEQ ID NO: 33666 - DNA, 21 bp, Homo sapiens
tcagtgagatytgtttgtact

SEQ ID NO: 33667 - DNA, 21 bp, Homo sapiens
ttcctcttaawagttgaatgt

SEQ ID NO: 33668 - DNA, 21 bp, Homo sapiens
agcccctacaygacttcatag

SEQ ID NO: 33669 - DNA, 21 bp, Homo sapiens
atagccctaaygggtttccat

SEQ ID NO: 33670 - DNA, 21 bp, Homo sapiens
gtgcatgcacrtgtgtctatt

SEQ ID NO: 33671 - DNA, 21 bp, Homo sapiens
ttgtctttgakgattttatga

SEQ ID NO: 33672 - DNA, 21 bp, Homo sapiens
gcagtctcatmatgaaacaag

SEQ ID NO: 33673 - DNA, 21 bp, Homo sapiens
gagaggacatwatcagaagaa

SEQ ID NO: 33674 - DNA, 21 bp, Homo sapiens
gagataaaacmtggagataat

SEQ ID NO: 33675 - DNA, 21 bp, Homo sapiens
ggagtcactgrtgcagtccct

SEQ ID NO: 33676 - DNA, 21 bp, Homo sapiens
tgacgctatcrtcatacaaat

SEQ ID NO: 33677 - DNA, 21 bp, Homo sapiens
cgcttctgctrccttgtcctc

SEQ ID NO: 33678 - DNA, 21 bp, Homo sapiens
atgacagatamatttacattc

SEQ ID NO: 33679 - DNA, 21 bp, Homo sapiens
accctactcarttcccatgag

SEQ ID NO: 33680 - DNA, 21 bp, Homo sapiens
ctcaggactcytctaagaata

SEQ ID NO: 33681 - DNA, 21 bp, Homo sapiens
actcagttacstagacttcac

SEQ ID NO: 33682 - DNA, 21 bp, Homo sapiens
catttgtgccrttcagtcagt

SEQ ID NO: 33683 - DNA, 21 bp, Homo sapiens
ttagcattgaytattataacc

SEQ ID NO: 33684 - DNA, 21 bp, Homo sapiens
agacagggagmgtccctgtca

SEQ ID NO: 33685 - DNA, 21 bp, Homo sapiens
atacttaaaargcttaaatga

SEQ ID NO: 33686 - DNA, 21 bp, Homo sapiens
tctgcttttcmattattccat

SEQ ID NO: 33687 - DNA, 21 bp, Homo sapiens
atacatttcasaagtttcgtt

SEQ ID NO: 33688 - DNA, 21 bp, Homo sapiens
agcaagctcayatgtgattca

SEQ ID NO: 33689 - DNA, 21 bp, Homo sapiens
ttaacaatttkttgctcttct

SEQ ID NO: 33690 - DNA, 21 bp, Homo sapiens
aaattccacayctcatctatg

SEQ ID NO: 33691 - DNA, 21 bp, Homo sapiens
aaacttacagmcccttgggtt

SEQ ID NO: 33692 - DNA, 21 bp, Homo sapiens
tcgccatcatwcccactttag

SEQ ID NO: 33693 - DNA, 21 bp, Homo sapiens
agaaaggagayaagtggctgc

SEQ ID NO: 33694 - DNA, 21 bp, Homo sapiens
attgcttgackgtacttacac

SEQ ID NO: 33695 - DNA, 21 bp, Homo sapiens
tatttagctaycaattttaac

SEQ ID NO: 33696 - DNA, 21 bp, Homo sapiens
ttctgggtgasagaagagtgg

SEQ ID NO: 33697 - DNA, 21 bp, Homo sapiens
gctaagaatarcacagaaaaa

SEQ ID NO: 33698 - DNA, 21 bp, Homo sapiens
tacagacttayataaacagtt

SEQ ID NO: 33699 - DNA, 21 bp, Homo sapiens
gaatatatgaragttgggtgc

SEQ ID NO: 33700 - DNA, 21 bp, Homo sapiens
gcatgtgaagwgtgtactctg

SEQ ID NO: 33701 - DNA, 21 bp, Homo sapiens
ctgtcatagcraactggaagg

SEQ ID NO: 33702 - DNA, 21 bp, Homo sapiens
aaatatttttmcatctttgct

SEQ ID NO: 33703 - DNA, 21 bp, Homo sapiens
ggcaagactcrcaagagggtc

SEQ ID NO: 33704 - DNA, 21 bp, Homo sapiens
tcaggattcawaggctatggt

SEQ ID NO: 33705 - DNA, 21 bp, Homo sapiens
tttgattgagrcattttttaa

SEQ ID NO: 33706 - DNA, 21 bp, Homo sapiens
gtctgtaatgrcatgtgggta

SEQ ID NO: 33707 - DNA, 21 bp, Homo sapiens
ccataaaagtygtccttctca

SEQ ID NO: 33708 - DNA, 21 bp, Homo sapiens
tgggactagaragagcacagg

SEQ ID NO: 33709 - DNA, 21 bp, Homo sapiens
cacctccaccycacacactga

SEQ ID NO: 33710 - DNA, 21 bp, Homo sapiens
tgagtatgcgraacacatgga

SEQ ID NO: 33711 - DNA, 21 bp, Homo sapiens
agtcttgacamttttctgaca

SEQ ID NO: 33712 - DNA, 21 bp, Homo sapiens
aggagaagccrtgatctcttt

SEQ ID NO: 33713 - DNA, 21 bp, Homo sapiens
ttctgtagatrgtccaataga

SEQ ID NO: 33714 - DNA, 21 bp, Homo sapiens
agctgtgagawaatatacagc

SEQ ID NO: 33715 - DNA, 21 bp, Homo sapiens
tcatctattcwgtagatactg

SEQ ID NO: 33716 - DNA, 21 bp, Homo sapiens
attttgaaatrccaagatttt

SEQ ID NO: 33717 - DNA, 21 bp, Homo sapiens
ttttgccaaaraaaccggaag

SEQ ID NO: 33718 - DNA, 21 bp, Homo sapiens
tttccattttyctcctttcct

SEQ ID NO: 33719 - DNA, 21 bp, Homo sapiens
cttttattgtkctagtcattc

SEQ ID NO: 33720 - DNA, 21 bp, Homo sapiens
aatcagtaacrcagaatagaa

SEQ ID NO: 33721 - DNA, 21 bp, Homo sapiens
cacaccactcrtgccaccaat

SEQ ID NO: 33722 - DNA, 21 bp, Homo sapiens
tacagagagaytggacaacac

SEQ ID NO: 33723 - DNA, 21 bp, Homo sapiens
atagaaaagcrtgtgataatg

SEQ ID NO: 33724 - DNA, 21 bp, Homo sapiens
agtaaaaatcrcaggatcaga

SEQ ID NO: 33725 - DNA, 21 bp, Homo sapiens
cttaatctccygtgcctgctt

SEQ ID NO: 33726 - DNA, 21 bp, Homo sapiens
tgagctgtgarcaactttaga

SEQ ID NO: 33727 - DNA, 21 bp, Homo sapiens
agaaagttttwtatcttcttt

SEQ ID NO: 33728 - DNA, 21 bp, Homo sapiens
ctagagttcaratcttagctt

SEQ ID NO: 33729 - DNA, 21 bp, Homo sapiens
gcagtgaacasagtaactcca

SEQ ID NO: 33730 - DNA, 21 bp, Homo sapiens
aacatttaatyctgaagacag

SEQ ID NO: 33731 - DNA, 21 bp, Homo sapiens
gatggtcccaytttattttaa

SEQ ID NO: 33732 - DNA, 21 bp, Homo sapiens
tcttaaactgyagtctggcta

SEQ ID NO: 33733 - DNA, 21 bp, Homo sapiens
cgccgagctcygcactgagcc

SEQ ID NO: 33734 - DNA, 21 bp, Homo sapiens
ctaccaaccgrctgaccccac

SEQ ID NO: 33735 - DNA, 21 bp, Homo sapiens
cagaaggtaartgtctccttt

SEQ ID NO: 33736 - DNA, 21 bp, Homo sapiens
tgtaacatatyatccacattg

SEQ ID NO: 33737 - DNA, 21 bp, Homo sapiens
gagaatcgctwgaacctgggg

SEQ ID NO: 33738 - DNA, 21 bp, Homo sapiens
ttatatacatrctcaattatc

SEQ ID NO: 33739 - DNA, 21 bp, Homo sapiens
tatcacgactrgctcctttct

SEQ ID NO: 33740 - DNA, 21 bp, Homo sapiens
atagttcagtmtcacatttgt

SEQ ID NO: 33741 - DNA, 21 bp, Homo sapiens
accaatcttgyatgccagaaa

SEQ ID NO: 33742 - DNA, 21 bp, Homo sapiens
aaaatgtccakagggctaagg

SEQ ID NO: 33743 - DNA, 21 bp, Homo sapiens
actaggaattygtcaaagcaa

SEQ ID NO: 33744 - DNA, 21 bp, Homo sapiens
cagtacctccwtgctgaggaa

SEQ ID NO: 33745 - DNA, 21 bp, Homo sapiens
aatcagtaatwaaaaaaaaaa

SEQ ID NO: 33746 - DNA, 21 bp, Homo sapiens
cacaatattgygcaaccccca

SEQ ID NO: 33747 - DNA, 21 bp, Homo sapiens
aacatacacawtgtgtttacc

SEQ ID NO: 33748 - DNA, 21 bp, Homo sapiens
tgtccatcacrtaaactttca

SEQ ID NO: 33749 - DNA, 21 bp, Homo sapiens
gacaaaagcargagtgaaaga

SEQ ID NO: 33750 - DNA, 21 bp, Homo sapiens
tcgtctgtttsggctgccata

SEQ ID NO: 33751 - DNA, 21 bp, Homo sapiens
ggagagacagytaaagtagat

SEQ ID NO: 33752 - DNA, 21 bp, Homo sapiens
gagcgacgttsactgaaatga

SEQ ID NO: 33753 - DNA, 21 bp, Homo sapiens
ctagattgaakttaaccattt

SEQ ID NO: 33754 - DNA, 21 bp, Homo sapiens
ccttcaaggarttatgggaaa

SEQ ID NO: 33755 - DNA, 21 bp, Homo sapiens
tctggctcgcktctcatattc

SEQ ID NO: 33756 - DNA, 21 bp, Homo sapiens
cagtgtctacmctctctcgag

SEQ ID NO: 33757 - DNA, 21 bp, Homo sapiens
gaaacttctcraggttccaag

SEQ ID NO: 33758 - DNA, 21 bp, Homo sapiens
gaaaatggaayaagaaataat

SEQ ID NO: 33759 - DNA, 21 bp, Homo sapiens
gactgctcagsggagacgcgg

SEQ ID NO: 33760 - DNA, 21 bp, Homo sapiens
gttgaggcaargtcacataag

SEQ ID NO: 33761 - DNA, 21 bp, Homo sapiens
aaggactctcyctcatggtgt

SEQ ID NO: 33762 - DNA, 21 bp, Homo sapiens
acctactgctrtagtcctgcc

SEQ ID NO: 33763 - DNA, 21 bp, Homo sapiens
ataggagtcasactgcttctg

SEQ ID NO: 33764 - DNA, 21 bp, Homo sapiens
acaatgaagcrtgaggtcttt

SEQ ID NO: 33765 - DNA, 21 bp, Homo sapiens
atgtatatgamgtatttaggg

SEQ ID NO: 33766 - DNA, 21 bp, Homo sapiens
tgaagatatcytcccagggtt

SEQ ID NO: 33767 - DNA, 21 bp, Homo sapiens
gagagagcagragtggcaccc

SEQ ID NO: 33768 - DNA, 21 bp, Homo sapiens
atgagtcagcrgaggagtatg

SEQ ID NO: 33769 - DNA, 21 bp, Homo sapiens
gacagagccarctaaggtaaa

SEQ ID NO: 33770 - DNA, 21 bp, Homo sapiens
atttgcaccckctatccttaa

SEQ ID NO: 33771 - DNA, 21 bp, Homo sapiens
tttacagcagrgggaacatct

SEQ ID NO: 33772 - DNA, 21 bp, Homo sapiens
tgcccaggtcrgtggggacca

SEQ ID NO: 33773 - DNA, 21 bp, Homo sapiens
agaacattctygtcctcacaa

SEQ ID NO: 33774 - DNA, 21 bp, Homo sapiens
atttataaacyatcttggtgc

SEQ ID NO: 33775 - DNA, 21 bp, Homo sapiens
gctgctcaacyacctcctctc

SEQ ID NO: 33776 - DNA, 21 bp, Homo sapiens
gacccagcttrcggttggttt

SEQ ID NO: 33777 - DNA, 21 bp, Homo sapiens
ctcatctcacrttacaaagac

SEQ ID NO: 33778 - DNA, 21 bp, Homo sapiens
catagatgacrtccaggggat

SEQ ID NO: 33779 - DNA, 21 bp, Homo sapiens
taagacttttwaaaaaagatc

SEQ ID NO: 33780 - DNA, 21 bp, Homo sapiens
gactcttcttkttaataaaat

SEQ ID NO: 33781 - DNA, 21 bp, Homo sapiens
tcacccagccrctcagtccct

SEQ ID NO: 33782 - DNA, 21 bp, Homo sapiens
aagtttcagtstgggaagagg

SEQ ID NO: 33783 - DNA, 21 bp, Homo sapiens
tgacctcagasagtgaggagg

SEQ ID NO: 33784 - DNA, 21 bp, Homo sapiens
agtgataaagygcctgggaga

SEQ ID NO: 33785 - DNA, 21 bp, Homo sapiens
gggtgaaatgygttgagtgta

SEQ ID NO: 33786 - DNA, 21 bp, Homo sapiens
gaatagttatyactacagggt

SEQ ID NO: 33787 - DNA, 21 bp, Homo sapiens
ccctatggagrtgaagaatag

SEQ ID NO: 33788 - DNA, 21 bp, Homo sapiens
aggccatcttyatcttggatg

SEQ ID NO: 33789 - DNA, 21 bp, Homo sapiens
atgaatagcamggtcctgcta

SEQ ID NO: 33790 - DNA, 21 bp, Homo sapiens
tactctctaaygttatcttct

SEQ ID NO: 33791 - DNA, 21 bp, Homo sapiens
agcattctcaycatgctacca

SEQ ID NO: 33792 - DNA, 21 bp, Homo sapiens
ccaaaaatttrggccgttttc

SEQ ID NO: 33793 - DNA, 21 bp, Homo sapiens
acagtgaagamattgatgaac

SEQ ID NO: 33794 - DNA, 21 bp, Homo sapiens
agtgtatgtayatttctcaca

SEQ ID NO: 33795 - DNA, 21 bp, Homo sapiens
ttaaatcctcyctgaaccatg

SEQ ID NO: 33796 - DNA, 21 bp, Homo sapiens
tgttgggagtrtcccactatg

SEQ ID NO: 33797 - DNA, 21 bp, Homo sapiens
atgtcaactaytgatggaagt

SEQ ID NO: 33798 - DNA, 21 bp, Homo sapiens
aactgaaacasataaaaatag

SEQ ID NO: 33799 - DNA, 21 bp, Homo sapiens
ccttacttggwtctctggtgc

SEQ ID NO: 33800 - DNA, 21 bp, Homo sapiens
tagataccctrtttttcctga

SEQ ID NO: 33801 - DNA, 21 bp, Homo sapiens
aggggtgtctrcaagtatcag

SEQ ID NO: 33802 - DNA, 21 bp, Homo sapiens
gaagaatgatytagggccttg

SEQ ID NO: 33803 - DNA, 21 bp, Homo sapiens
gagcagcagtyggtcaggtgg

SEQ ID NO: 33804 - DNA, 21 bp, Homo sapiens
tggacggaggygcctgacagt

SEQ ID NO: 33805 - DNA, 21 bp, Homo sapiens
tccccagtggratttttaatt

SEQ ID NO: 33806 - DNA, 21 bp, Homo sapiens
ccaagttctcmaatcactcaa

SEQ ID NO: 33807 - DNA, 21 bp, Homo sapiens
cacaccttctrttctctcaac

SEQ ID NO: 33808 - DNA, 21 bp, Homo sapiens
ttctgttcagmtagcacagtt

SEQ ID NO: 33809 - DNA, 21 bp, Homo sapiens
gattgacgaayaagacaaggc

SEQ ID NO: 33810 - DNA, 21 bp, Homo sapiens
gtccattctcytggacaaata

SEQ ID NO: 33811 - DNA, 21 bp, Homo sapiens
tctgggttttyttaaaggctg

SEQ ID NO: 33812 - DNA, 21 bp, Homo sapiens
cttatgtttaraaaggaacaa

SEQ ID NO: 33813 - DNA, 21 bp, Homo sapiens
attcataatgrtttgttctgg

SEQ ID NO: 33814 - DNA, 21 bp, Homo sapiens
tgcggtgcacrgtatgtacta

SEQ ID NO: 33815 - DNA, 21 bp, Homo sapiens
agagcttattkgggacaactg

SEQ ID NO: 33816 - DNA, 21 bp, Homo sapiens
aatacccaccrgctttgccat

SEQ ID NO: 33817 - DNA, 21 bp, Homo sapiens
accaagcacaygacgtctatg

SEQ ID NO: 33818 - DNA, 21 bp, Homo sapiens
gatcttcctcrcaatttctct

SEQ ID NO: 33819 - DNA, 21 bp, Homo sapiens
tatgggaaagygctattggcg

SEQ ID NO: 33820 - DNA, 21 bp, Homo sapiens
gccagtcatgmactcccttac

SEQ ID NO: 33821 - DNA, 21 bp, Homo sapiens
tagacggaaakctctcagtca

SEQ ID NO: 33822 - DNA, 21 bp, Homo sapiens
aaaagtaaaastatatttgtg

SEQ ID NO: 33823 - DNA, 21 bp, Homo sapiens
atcggaatccrccttgacttg

SEQ ID NO: 33824 - DNA, 21 bp, Homo sapiens
agaactcaacyctgttatgtg

SEQ ID NO: 33825 - DNA, 21 bp, Homo sapiens
ggtatccatayggcaaaaaag

SEQ ID NO: 33826 - DNA, 21 bp, Homo sapiens
ttgcattattyttctgagtta

SEQ ID NO: 33827 - DNA, 21 bp, Homo sapiens
tcattgttttscaagaaatga

SEQ ID NO: 33828 - DNA, 21 bp, Homo sapiens
gatgtagatgyataactttaa

SEQ ID NO: 33829 - DNA, 21 bp, Homo sapiens
tatgattctgrccaccctgtt

SEQ ID NO: 33830 - DNA, 21 bp, Homo sapiens
ttgtatagctytagggtcttg

SEQ ID NO: 33831 - DNA, 21 bp, Homo sapiens
tctcaactagytatgtcatgg

SEQ ID NO: 33832 - DNA, 21 bp, Homo sapiens
agggagtgctsaatagataca

SEQ ID NO: 33833 - DNA, 21 bp, Homo sapiens
ccaaaagaatmatggataagt

SEQ ID NO: 33834 - DNA, 21 bp, Homo sapiens
ttgtagagggwgagagaggag

SEQ ID NO: 33835 - DNA, 21 bp, Homo sapiens
tatataggtargcctgtttaa

SEQ ID NO: 33836 - DNA, 21 bp, Homo sapiens
tgatactggcsctatggttta

SEQ ID NO: 33837 - DNA, 21 bp, Homo sapiens
gtttaaaagaygccaatgtcc

SEQ ID NO: 33838 - DNA, 21 bp, Homo sapiens
ttagttaatamcttcaaaaag

SEQ ID NO: 33839 - DNA, 21 bp, Homo sapiens
gtccgattgtrgcgggggagg

SEQ ID NO: 33840 - DNA, 21 bp, Homo sapiens
tccacttcatrtcccctttac

SEQ ID NO: 33841 - DNA, 21 bp, Homo sapiens
tcagatgttayccaaagcata

SEQ ID NO: 33842 - DNA, 21 bp, Homo sapiens
aagatgtcttygtagggcgcc

SEQ ID NO: 33843 - DNA, 21 bp, Homo sapiens
caagcctcatkaaatgtaata

SEQ ID NO: 33844 - DNA, 21 bp, Homo sapiens
gatgcccctcwgtttggcttc

SEQ ID NO: 33845 - DNA, 21 bp, Homo sapiens
ttcaaatgaaygcttgatgcc

SEQ ID NO: 33846 - DNA, 21 bp, Homo sapiens
gggggaccaarcaagagggta

SEQ ID NO: 33847 - DNA, 21 bp, Homo sapiens
gcataataacmgaatttttca

SEQ ID NO: 33848 - DNA, 21 bp, Homo sapiens
tatccctcagraacacatttt

SEQ ID NO: 33849 - DNA, 21 bp, Homo sapiens
atgcttggaayataactgttt

SEQ ID NO: 33850 - DNA, 21 bp, Homo sapiens
tctccaaattygttcttcttt

SEQ ID NO: 33851 - DNA, 21 bp, Homo sapiens
gaactttaacrttgttctaac

SEQ ID NO: 33852 - DNA, 21 bp, Homo sapiens
gagtgctaggyggaccagatg

SEQ ID NO: 33853 - DNA, 21 bp, Homo sapiens
aggaaccataygatcaaaaat

SEQ ID NO: 33854 - DNA, 21 bp, Homo sapiens
gtctgccctgsagaaattgtg

SEQ ID NO: 33855 - DNA, 21 bp, Homo sapiens
ttgtttgaatycatggaagtg

SEQ ID NO: 33856 - DNA, 21 bp, Homo sapiens
gttttttacarttcataaatt

SEQ ID NO: 33857 - DNA, 21 bp, Homo sapiens
ctgcgtatccrtaggtaaccg

SEQ ID NO: 33858 - DNA, 21 bp, Homo sapiens
cttatttcctraacatctgaa

SEQ ID NO: 33859 - DNA, 21 bp, Homo sapiens
tgcctttgtgrgctagatgag

SEQ ID NO: 33860 - DNA, 21 bp, Homo sapiens
attttctcacytctccactac

SEQ ID NO: 33861 - DNA, 21 bp, Homo sapiens
tccttaagcaragagtcatga

SEQ ID NO: 33862 - DNA, 21 bp, Homo sapiens
tagaaaatgaytcctcatgac

SEQ ID NO: 33863 - DNA, 21 bp, Homo sapiens
cctatgaccargtcactacag

SEQ ID NO: 33864 - DNA, 21 bp, Homo sapiens
acaagtttcaytgtggctcta

SEQ ID NO: 33865 - DNA, 21 bp, Homo sapiens
gctaccctcaktggatttctt

SEQ ID NO: 33866 - DNA, 21 bp, Homo sapiens
tcatcaccttrtttctaaacc

SEQ ID NO: 33867 - DNA, 21 bp, Homo sapiens
caaaatgaggrctccagtcca

SEQ ID NO: 33868 - DNA, 21 bp, Homo sapiens
caaagggcatkggggagtgag

SEQ ID NO: 33869 - DNA, 21 bp, Homo sapiens
ggccttaaggraacatccatg

SEQ ID NO: 33870 - DNA, 21 bp, Homo sapiens
agtggaggaayaaacctatct

SEQ ID NO: 33871 - DNA, 21 bp, Homo sapiens
ggctaaattasaaaaatggaa

SEQ ID NO: 33872 - DNA, 21 bp, Homo sapiens
cttgagggggsgtaaagcatg

SEQ ID NO: 33873 - DNA, 21 bp, Homo sapiens
tgttttatttragattaggcc

SEQ ID NO: 33874 - DNA, 21 bp, Homo sapiens
tctccctgttrgaggaaccta

SEQ ID NO: 33875 - DNA, 21 bp, Homo sapiens
aactctgttcytagcttccgt

SEQ ID NO: 33876 - DNA, 21 bp, Homo sapiens
cctagtgctaragagtgaatt

SEQ ID NO: 33877 - DNA, 21 bp, Homo sapiens
tctcatctctrctgttacctc

SEQ ID NO: 33878 - DNA, 21 bp, Homo sapiens
ctgaaaagtgsgggccttttc

SEQ ID NO: 33879 - DNA, 21 bp, Homo sapiens
aaatcttactrtagccagagt

SEQ ID NO: 33880 - DNA, 21 bp, Homo sapiens
gttgtcacccrtcagctcacg

SEQ ID NO: 33881 - DNA, 21 bp, Homo sapiens
tctccaaatakagctgttaat

SEQ ID NO: 33882 - DNA, 21 bp, Homo sapiens
ttcacaaataygtagaaataa

SEQ ID NO: 33883 - DNA, 21 bp, Homo sapiens
ttgcaacatamggccgctgca

SEQ ID NO: 33884 - DNA, 21 bp, Homo sapiens
tcttgtgatayagcagtgaac

SEQ ID NO: 33885 - DNA, 21 bp, Homo sapiens
ggaggggaagkgaataaacaa

SEQ ID NO: 33886 - DNA, 21 bp, Homo sapiens
tgaagacagayctcggaggac

SEQ ID NO: 33887 - DNA, 21 bp, Homo sapiens
ttagagatgtygcttccagga

SEQ ID NO: 33888 - DNA, 21 bp, Homo sapiens
tgttctatgcsttgtaaagca

SEQ ID NO: 33889 - DNA, 21 bp, Homo sapiens
ataaattccaygaggaaaaag

SEQ ID NO: 33890 - DNA, 21 bp, Homo sapiens
atttctggagkaatcaagaat

SEQ ID NO: 33891 - DNA, 21 bp, Homo sapiens
taaaataggasggtggagatg

SEQ ID NO: 33892 - DNA, 21 bp, Homo sapiens
ttctctcattygtgggcaaac

SEQ ID NO: 33893 - DNA, 21 bp, Homo sapiens
tgagttggcasgtggggaacc

SEQ ID NO: 33894 - DNA, 21 bp, Homo sapiens
gttggctgccygtaattgctt

SEQ ID NO: 33895 - DNA, 21 bp, Homo sapiens
acattaagaartccatgctgg

SEQ ID NO: 33896 - DNA, 21 bp, Homo sapiens
agaattgcctygttgtttttt

SEQ ID NO: 33897 - DNA, 21 bp, Homo sapiens
ttcctgctggmattgactctt

SEQ ID NO: 33898 - DNA, 21 bp, Homo sapiens
ctgacttctcraagaaagtga

SEQ ID NO: 33899 - DNA, 21 bp, Homo sapiens
cgggtacccaytggatctcta

SEQ ID NO: 33900 - DNA, 21 bp, Homo sapiens
attcttttttwaaaaaagaga

SEQ ID NO: 33901 - DNA, 21 bp, Homo sapiens
gtctggattcyggatctggga

SEQ ID NO: 33902 - DNA, 21 bp, Homo sapiens
agccaggccargggattggga

SEQ ID NO: 33903 - DNA, 21 bp, Homo sapiens
ccctggcccayggataaaccc

SEQ ID NO: 33904 - DNA, 21 bp, Homo sapiens
gacaagttaartaacaaatag

SEQ ID NO: 33905 - DNA, 21 bp, Homo sapiens
caattggtctsggctatcaaa

SEQ ID NO: 33906 - DNA, 21 bp, Homo sapiens
ggatatgaaayagtcttctct

SEQ ID NO: 33907 - DNA, 21 bp, Homo sapiens
gatagcatacraaagacatgg

SEQ ID NO: 33908 - DNA, 21 bp, Homo sapiens
ctcatggtctmtttgttcttc

SEQ ID NO: 33909 - DNA, 21 bp, Homo sapiens
gtttttggtcrtatgtcaaag

SEQ ID NO: 33910 - DNA, 21 bp, Homo sapiens
gtggtatctgratttgcctgg

SEQ ID NO: 33911 - DNA, 21 bp, Homo sapiens
aattctttggrtaactggcaa

SEQ ID NO: 33912 - DNA, 21 bp, Homo sapiens
agcatataaaktccatctccc

SEQ ID NO: 33913 - DNA, 21 bp, Homo sapiens
cttccctgtcygtgagggact

SEQ ID NO: 33914 - DNA, 21 bp, Homo sapiens
ctgaccaatgrccactgtggc

SEQ ID NO: 33915 - DNA, 21 bp, Homo sapiens
aatttgggggsacaagcatac

SEQ ID NO: 33916 - DNA, 21 bp, Homo sapiens
gagttgaactkttcttttgat

SEQ ID NO: 33917 - DNA, 21 bp, Homo sapiens
atatcaacacrtaaaacctag

SEQ ID NO: 33918 - DNA, 21 bp, Homo sapiens
atgcccatcayaaatgatgtc

SEQ ID NO: 33919 - DNA, 21 bp, Homo sapiens
tcccatgtcakgtaatgcctc

SEQ ID NO: 33920 - DNA, 21 bp, Homo sapiens
gtctattttaygccccttacg

SEQ ID NO: 33921 - DNA, 21 bp, Homo sapiens
acctaggaggkcagccaactt

SEQ ID NO: 33922 - DNA, 21 bp, Homo sapiens
gagagagaccmgtgtctctgc

SEQ ID NO: 33923 - DNA, 21 bp, Homo sapiens
cttggatgagygttgagaatg

SEQ ID NO: 33924 - DNA, 21 bp, Homo sapiens
atttaggagtrtcttcaccta

SEQ ID NO: 33925 - DNA, 21 bp, Homo sapiens
tttgtcttgarattccttctt

SEQ ID NO: 33926 - DNA, 21 bp, Homo sapiens
cttaatcgttmgcaaagacat

SEQ ID NO: 33927 - DNA, 21 bp, Homo sapiens
ttaaataagckgaacccctta

SEQ ID NO: 33928 - DNA, 21 bp, Homo sapiens
ccactttcctygttaaagtga

SEQ ID NO: 33929 - DNA, 21 bp, Homo sapiens
cctcaaacttmaaatattttc

SEQ ID NO: 33930 - DNA, 21 bp, Homo sapiens
ttcaagagtgrttcaacagac

SEQ ID NO: 33931 - DNA, 21 bp, Homo sapiens
attacgtgaartattgttttg

SEQ ID NO: 33932 - DNA, 21 bp, Homo sapiens
ttgtccccccrgaaaaaaaga

SEQ ID NO: 33933 - DNA, 21 bp, Homo sapiens
atatgtaggaratgcactcat

SEQ ID NO: 33934 - DNA, 21 bp, Homo sapiens
gagtatgtatsctagctatac

SEQ ID NO: 33935 - DNA, 21 bp, Homo sapiens
tccgactcacyaaagagtctg

SEQ ID NO: 33936 - DNA, 21 bp, Homo sapiens
ctgtaatcctyaatgctagaa

SEQ ID NO: 33937 - DNA, 21 bp, Homo sapiens
cagttatacayaccactttga

SEQ ID NO: 33938 - DNA, 21 bp, Homo sapiens
ctgggaatgartagcaagggg

SEQ ID NO: 33939 - DNA, 21 bp, Homo sapiens
cactttaactrgctggagcca

SEQ ID NO: 33940 - DNA, 21 bp, Homo sapiens
tttcacagcayagtctttggc

SEQ ID NO: 33941 - DNA, 21 bp, Homo sapiens
tccatatgccyctgataaact

SEQ ID NO: 33942 - DNA, 21 bp, Homo sapiens
ctttcttttcrctactccttg

SEQ ID NO: 33943 - DNA, 21 bp, Homo sapiens
ttgtggaattstggatatcaa

SEQ ID NO: 33944 - DNA, 21 bp, Homo sapiens
aagggaacttytcccatttca

SEQ ID NO: 33945 - DNA, 21 bp, Homo sapiens
ttttgccataytatatggtgc

SEQ ID NO: 33946 - DNA, 21 bp, Homo sapiens
ataagttaaayatctctcttc

SEQ ID NO: 33947 - DNA, 21 bp, Homo sapiens
ctcttataaakgcccttgtga

SEQ ID NO: 33948 - DNA, 21 bp, Homo sapiens
gtgtacatccrcaagattgaa

SEQ ID NO: 33949 - DNA, 21 bp, Homo sapiens
atttaaaaatmtcagacaatc

SEQ ID NO: 33950 - DNA, 21 bp, Homo sapiens
caaggtttggyaagtgaaata

SEQ ID NO: 33951 - DNA, 21 bp, Homo sapiens
gtatggcatcrttgataaatc

SEQ ID NO: 33952 - DNA, 21 bp, Homo sapiens
aaaatccactrcatgcagaca

SEQ ID NO: 33953 - DNA, 21 bp, Homo sapiens
tatcttccagrtaacagcaga

SEQ ID NO: 33954 - DNA, 21 bp, Homo sapiens
ttttttatttytgaaataatg

SEQ ID NO: 33955 - DNA, 21 bp, Homo sapiens
ggtattttttwattttttact

SEQ ID NO: 33956 - DNA, 21 bp, Homo sapiens
tgatacagtasagagccaata

SEQ ID NO: 33957 - DNA, 21 bp, Homo sapiens
tacaagctaayagttaaaaat

SEQ ID NO: 33958 - DNA, 21 bp, Homo sapiens
gttttaactayaaaattctga

SEQ ID NO: 33959 - DNA, 21 bp, Homo sapiens
atctaaatgtraaaaaaaagt

SEQ ID NO: 33960 - DNA, 21 bp, Homo sapiens
aacttccagaraactatcttt

SEQ ID NO: 33961 - DNA, 21 bp, Homo sapiens
ctatcatgaayttggtcacag

SEQ ID NO: 33962 - DNA, 21 bp, Homo sapiens
acaagatctcrgttaactttg

SEQ ID NO: 33963 - DNA, 21 bp, Homo sapiens
ctctattcctrtcacacttgc

SEQ ID NO: 33964 - DNA, 21 bp, Homo sapiens
aaaaggaaacyttaaaatagc

SEQ ID NO: 33965 - DNA, 21 bp, Homo sapiens
tcacaaaatawgccagagtca

SEQ ID NO: 33966 - DNA, 21 bp, Homo sapiens
tcactgcatgmcagccaaggg

SEQ ID NO: 33967 - DNA, 21 bp, Homo sapiens
gctactgaacwttagatctta

SEQ ID NO: 33968 - DNA, 21 bp, Homo sapiens
tatcaactgtrcaagaaaaat

SEQ ID NO: 33969 - DNA, 21 bp, Homo sapiens
aagcattttgytccccaaaaa

SEQ ID NO: 33970 - DNA, 21 bp, Homo sapiens
gggaaaaatayattttctgct

SEQ ID NO: 33971 - DNA, 21 bp, Homo sapiens
tattttgtgcratagtggtta

SEQ ID NO: 33972 - DNA, 21 bp, Homo sapiens
agttcctgacyggcactgatt

SEQ ID NO: 33973 - DNA, 21 bp, Homo sapiens
ctttcatttaytaatgcaaag

SEQ ID NO: 33974 - DNA, 21 bp, Homo sapiens
ctgtgactatrcttactgaaa

SEQ ID NO: 33975 - DNA, 21 bp, Homo sapiens
aaaaatatgcrtggagtcact

SEQ ID NO: 33976 - DNA, 21 bp, Homo sapiens
tgattaagcayttgctgtgta

SEQ ID NO: 33977 - DNA, 21 bp, Homo sapiens
tcattgctacrttgctgctag

SEQ ID NO: 33978 - DNA, 21 bp, Homo sapiens
catatggctarcgtattggtc

SEQ ID NO: 33979 - DNA, 21 bp, Homo sapiens
atattttttcyttgctgtttt

SEQ ID NO: 33980 - DNA, 21 bp, Homo sapiens
aaaagaacagygggcctggat

SEQ ID NO: 33981 - DNA, 21 bp, Homo sapiens
ccttttatttmttttttccta

SEQ ID NO: 33982 - DNA, 21 bp, Homo sapiens
cactttctagkcacaggttcc

SEQ ID NO: 33983 - DNA, 21 bp, Homo sapiens
catttattgcktactttcaca

SEQ ID NO: 33984 - DNA, 21 bp, Homo sapiens
tttattcttaygtcttttatt

SEQ ID NO: 33985 - DNA, 21 bp, Homo sapiens
gacatgagttraattaatgca

SEQ ID NO: 33986 - DNA, 21 bp, Homo sapiens
tgcagaagacyttctgccaca

SEQ ID NO: 33987 - DNA, 21 bp, Homo sapiens
agcacaggctwaaatctcttc

SEQ ID NO: 33988 - DNA, 21 bp, Homo sapiens
cccagaataayaccatttcca

SEQ ID NO: 33989 - DNA, 21 bp, Homo sapiens
ttcttaaaacragcaagtttt

SEQ ID NO: 33990 - DNA, 21 bp, Homo sapiens
tataatgtccwcgtaccattt

SEQ ID NO: 33991 - DNA, 21 bp, Homo sapiens
ggcgaggggtmttctcatgag

SEQ ID NO: 33992 - DNA, 21 bp, Homo sapiens
atgagctcagrcaaagactga

SEQ ID NO: 33993 - DNA, 21 bp, Homo sapiens
tcccatcaagyctgatataga

SEQ ID NO: 33994 - DNA, 21 bp, Homo sapiens
ctcctgcaagyggcattgagg

SEQ ID NO: 33995 - DNA, 21 bp, Homo sapiens
tatcaatggayggggcagggt

SEQ ID NO: 33996 - DNA, 21 bp, Homo sapiens
ggattcctttrggctttgcat

SEQ ID NO: 33997 - DNA, 21 bp, Homo sapiens
tctttgtctgrtctcacaaca

SEQ ID NO: 33998 - DNA, 21 bp, Homo sapiens
cttaggtaggraaaatcattg

SEQ ID NO: 33999 - DNA, 21 bp, Homo sapiens
ttcttaagcayagtggagtac

SEQ ID NO: 34000 - DNA, 21 bp, Homo sapiens
accatcttctrtcagggactt

SEQ ID NO: 34001 - DNA, 21 bp, Homo sapiens
tgcctgtatgrgtagaactca

SEQ ID NO: 34002 - DNA, 21 bp, Homo sapiens
ccctgaccacrgtgcagctga

SEQ ID NO: 34003 - DNA, 21 bp, Homo sapiens
aagtgtactcmacaaaggttg

SEQ ID NO: 34004 - DNA, 21 bp, Homo sapiens
aaaatcaagcwctcgtgctgc

SEQ ID NO: 34005 - DNA, 21 bp, Homo sapiens
ctaacgtacarattcctgagg

SEQ ID NO: 34006 - DNA, 21 bp, Homo sapiens
agtatttgaayggcaaacgtc

SEQ ID NO: 34007 - DNA, 21 bp, Homo sapiens
ccagtttgtgyttacgcaact

SEQ ID NO: 34008 - DNA, 21 bp, Homo sapiens
gggaccaggtktgtcatccag

SEQ ID NO: 34009 - DNA, 21 bp, Homo sapiens
ctcttcttccrttaccaatgt

SEQ ID NO: 34010 - DNA, 21 bp, Homo sapiens
ttccaagaagsagggttacca

SEQ ID NO: 34011 - DNA, 21 bp, Homo sapiens
ggttcaagggsaactggcacc

SEQ ID NO: 34012 - DNA, 21 bp, Homo sapiens
tctcacgtcaragaaaacggc

SEQ ID NO: 34013 - DNA, 21 bp, Homo sapiens
ctgagcaaggytgtaactctt

SEQ ID NO: 34014 - DNA, 21 bp, Homo sapiens
accaactaacwacattaacaa

SEQ ID NO: 34015 - DNA, 21 bp, Homo sapiens
gtacaagtatrtgaaagcaca

SEQ ID NO: 34016 - DNA, 21 bp, Homo sapiens
gtgtttttttwaaaaatgaaa

SEQ ID NO: 34017 - DNA, 21 bp, Homo sapiens
gcagatgccgrcaatatgctt

SEQ ID NO: 34018 - DNA, 21 bp, Homo sapiens
gctttgaacaytggcagtatc

SEQ ID NO: 34019 - DNA, 21 bp, Homo sapiens
gacctgctctrgccagtggga

SEQ ID NO: 34020 - DNA, 21 bp, Homo sapiens
aggcttcatcmaggcctcccc

SEQ ID NO: 34021 - DNA, 21 bp, Homo sapiens
acctcccaaaytggacctaaa

SEQ ID NO: 34022 - DNA, 21 bp, Homo sapiens
tcctggtctgrtctgcgtcag

SEQ ID NO: 34023 - DNA, 21 bp, Homo sapiens
gggttttaaaygtcatctacc

SEQ ID NO: 34024 - DNA, 21 bp, Homo sapiens
ctgcggaaaaygcaatgccgt

SEQ ID NO: 34025 - DNA, 21 bp, Homo sapiens
ggtcaggagaygaggtgaggg

SEQ ID NO: 34026 - DNA, 21 bp, Homo sapiens
cctttccagastatctgacaa

SEQ ID NO: 34027 - DNA, 21 bp, Homo sapiens
gctcagtcctstaatatgcag

SEQ ID NO: 34028 - DNA, 21 bp, Homo sapiens
aacatccacaytaatatcgat

SEQ ID NO: 34029 - DNA, 21 bp, Homo sapiens
tcaccggatgrgggaagggac

SEQ ID NO: 34030 - DNA, 21 bp, Homo sapiens
gtcggcacccygggtttaagc

SEQ ID NO: 34031 - DNA, 21 bp, Homo sapiens
agaggtcattygaaataaaat

SEQ ID NO: 34032 - DNA, 21 bp, Homo sapiens
agctaatagcwagtgagggaa

SEQ ID NO: 34033 - DNA, 21 bp, Homo sapiens
ttatatttgcytccctacatc

SEQ ID NO: 34034 - DNA, 21 bp, Homo sapiens
ttgatcttttmgagaaactga

SEQ ID NO: 34035 - DNA, 21 bp, Homo sapiens
tcagttatttyctcatctgtt

SEQ ID NO: 34036 - DNA, 21 bp, Homo sapiens
atgctttcttstctgacctta

SEQ ID NO: 34037 - DNA, 21 bp, Homo sapiens
gataccgtgcyaccatggcct

SEQ ID NO: 34038 - DNA, 21 bp, Homo sapiens
gcagtgtgttmaaagaaacac

SEQ ID NO: 34039 - DNA, 21 bp, Homo sapiens
gaaaagatgcrgatgatatat

SEQ ID NO: 34040 - DNA, 21 bp, Homo sapiens
gaccacacaastagtggaatg

SEQ ID NO: 34041 - DNA, 21 bp, Homo sapiens
tagagtgtgascatctatgtg

SEQ ID NO: 34042 - DNA, 21 bp, Homo sapiens
aaatagctacrtgtcttggga

SEQ ID NO: 34043 - DNA, 21 bp, Homo sapiens
cctcctcccaycgcaccatgt

SEQ ID NO: 34044 - DNA, 21 bp, Homo sapiens
agtccagcatsctcatatggt

SEQ ID NO: 34045 - DNA, 21 bp, Homo sapiens
gctatgacagwgttgggtttg

SEQ ID NO: 34046 - DNA, 21 bp, Homo sapiens
gttctggtctrctctgcgatg

SEQ ID NO: 34047 - DNA, 21 bp, Homo sapiens
tatctgtttcrcactttataa

SEQ ID NO: 34048 - DNA, 21 bp, Homo sapiens
aatgcgttttyttcctaaaag

SEQ ID NO: 34049 - DNA, 21 bp, Homo sapiens
ttgggggactsactgttgtta

SEQ ID NO: 34050 - DNA, 21 bp, Homo sapiens
ccacttatgcygttcttaaag

SEQ ID NO: 34051 - DNA, 21 bp, Homo sapiens
tcccccacagstttctcactc

SEQ ID NO: 34052 - DNA, 21 bp, Homo sapiens
gtggtgtatcycattaatgtc

SEQ ID NO: 34053 - DNA, 21 bp, Homo sapiens
tggaagacttygagacgattg

SEQ ID NO: 34054 - DNA, 21 bp, Homo sapiens
ttcctccagasttccagtctc

SEQ ID NO: 34055 - DNA, 21 bp, Homo sapiens
gggttaagcgmcctactcagg

SEQ ID NO: 34056 - DNA, 21 bp, Homo sapiens
aacaataaacmacgcaaaaag

SEQ ID NO: 34057 - DNA, 21 bp, Homo sapiens
ttgctggcaawtctgttaaat

SEQ ID NO: 34058 - DNA, 21 bp, Homo sapiens
tcaatgcaaaygagcgtttat

SEQ ID NO: 34059 - DNA, 21 bp, Homo sapiens
gctatgtcaawgtcaaagtta

SEQ ID NO: 34060 - DNA, 21 bp, Homo sapiens
tcgtttacaawtttaaatgac

SEQ ID NO: 34061 - DNA, 21 bp, Homo sapiens
tactattaccrttactaaaac

SEQ ID NO: 34062 - DNA, 21 bp, Homo sapiens
ttatattaatmttttggagaa

SEQ ID NO: 34063 - DNA, 21 bp, Homo sapiens
aacgacaaaayaacttgaaag

SEQ ID NO: 34064 - DNA, 21 bp, Homo sapiens
tcttaggcacmgaaaataata

SEQ ID NO: 34065 - DNA, 21 bp, Homo sapiens
aatagaaagcrgcaggacgaa

SEQ ID NO: 34066 - DNA, 21 bp, Homo sapiens
gctcattcttygctcaggact

SEQ ID NO: 34067 - DNA, 21 bp, Homo sapiens
aaaactgttgygacataacct

SEQ ID NO: 34068 - DNA, 21 bp, Homo sapiens
ccacttttcakactcaataca

SEQ ID NO: 34069 - DNA, 21 bp, Homo sapiens
caaattgataygaccccccat

SEQ ID NO: 34070 - DNA, 21 bp, Homo sapiens
gctgcacggtrtgcattcttt

SEQ ID NO: 34071 - DNA, 21 bp, Homo sapiens
aaaatattgcrtaggttttag

SEQ ID NO: 34072 - DNA, 21 bp, Homo sapiens
caattgtccartgttttagct

SEQ ID NO: 34073 - DNA, 21 bp, Homo sapiens
atacaaagcayggtgaattgt

SEQ ID NO: 34074 - DNA, 21 bp, Homo sapiens
attcaaaatcyggaggagtcc

SEQ ID NO: 34075 - DNA, 21 bp, Homo sapiens
agtacaattcrccagcaaagc

SEQ ID NO: 34076 - DNA, 21 bp, Homo sapiens
gttcaacaaayatcctcacga

SEQ ID NO: 34077 - DNA, 21 bp, Homo sapiens
acggagcatgwcacacacaat

SEQ ID NO: 34078 - DNA, 21 bp, Homo sapiens
tcagaatctgwatctttgctt

SEQ ID NO: 34079 - DNA, 21 bp, Homo sapiens
atgaggaaagsatagctactt

SEQ ID NO: 34080 - DNA, 21 bp, Homo sapiens
atttctaccawggtggtatcc

SEQ ID NO: 34081 - DNA, 21 bp, Homo sapiens
tgaaaaaattrgctcccattt

SEQ ID NO: 34082 - DNA, 21 bp, Homo sapiens
acatagcgcayggactgagtg

SEQ ID NO: 34083 - DNA, 21 bp, Homo sapiens
cggagactctstacttagtag

SEQ ID NO: 34084 - DNA, 21 bp, Homo sapiens
tcagcatcctrgagcaagagg

SEQ ID NO: 34085 - DNA, 21 bp, Homo sapiens
cacccaaggaytgattcaatt

SEQ ID NO: 34086 - DNA, 21 bp, Homo sapiens
ccatttccatrttccctggtg

SEQ ID NO: 34087 - DNA, 21 bp, Homo sapiens
ctcctattatmcctcataatt

SEQ ID NO: 34088 - DNA, 21 bp, Homo sapiens
gagctttcttycttggtttgc

SEQ ID NO: 34089 - DNA, 21 bp, Homo sapiens
aatcctgaagyatcagattcc

SEQ ID NO: 34090 - DNA, 21 bp, Homo sapiens
agcaacctggrgccctgcaac

SEQ ID NO: 34091 - DNA, 21 bp, Homo sapiens
aatccttgtgyatttattagc

SEQ ID NO: 34092 - DNA, 21 bp, Homo sapiens
agatacggtgraaccaaaatt

SEQ ID NO: 34093 - DNA, 21 bp, Homo sapiens
tgtaaattccrgtatcagggc

SEQ ID NO: 34094 - DNA, 21 bp, Homo sapiens
caaaaatactrcaggcccata

SEQ ID NO: 34095 - DNA, 21 bp, Homo sapiens
acaggtaatgsatgggcctca

SEQ ID NO: 34096 - DNA, 21 bp, Homo sapiens
tgtataagcawtgtcttttgc

SEQ ID NO: 34097 - DNA, 21 bp, Homo sapiens
gtgagatgtcytccaaaggct

SEQ ID NO: 34098 - DNA, 21 bp, Homo sapiens
ttcaacaatgyaagcaaagat

SEQ ID NO: 34099 - DNA, 21 bp, Homo sapiens
actgacactawtaactggccg

SEQ ID NO: 34100 - DNA, 21 bp, Homo sapiens
ttccacctccrgccaagaaca

SEQ ID NO: 34101 - DNA, 21 bp, Homo sapiens
acagcgtgagratttgactga

SEQ ID NO: 34102 - DNA, 21 bp, Homo sapiens
tttctgcaggygcagaaacgg

SEQ ID NO: 34103 - DNA, 21 bp, Homo sapiens
atggtgggtayttaattcttc

SEQ ID NO: 34104 - DNA, 21 bp, Homo sapiens
cctgtgaaagsaaaagtgacc

SEQ ID NO: 34105 - DNA, 21 bp, Homo sapiens
agatggtgccytttggaaagt

SEQ ID NO: 34106 - DNA, 21 bp, Homo sapiens
gcgtattaaartggaaacacg

SEQ ID NO: 34107 - DNA, 21 bp, Homo sapiens
cacagttcccragaagaaggg

SEQ ID NO: 34108 - DNA, 21 bp, Homo sapiens
tataaactccrtgaggataat

SEQ ID NO: 34109 - DNA, 21 bp, Homo sapiens
aaagtgttccrattgaaagaa

SEQ ID NO: 34110 - DNA, 21 bp, Homo sapiens
ttgccaattakctggagtaat

SEQ ID NO: 34111 - DNA, 21 bp, Homo sapiens
tagggacactkacccttgcac

SEQ ID NO: 34112 - DNA, 21 bp, Homo sapiens
atagtattggrtgagaatgca

SEQ ID NO: 34113 - DNA, 21 bp, Homo sapiens
tattgtgcaayttgtaagtga

SEQ ID NO: 34114 - DNA, 21 bp, Homo sapiens
aattctcaccyattaacatca

SEQ ID NO: 34115 - DNA, 21 bp, Homo sapiens
tgttcgactgmgaatcaccag

SEQ ID NO: 34116 - DNA, 21 bp, Homo sapiens
ttatgattatyattattactg

SEQ ID NO: 34117 - DNA, 21 bp, Homo sapiens
aactgagcatwttccagaatt

SEQ ID NO: 34118 - DNA, 21 bp, Homo sapiens
ttagcatgacytttcccaaca

SEQ ID NO: 34119 - DNA, 21 bp, Homo sapiens
agccatacatrggattatttt

SEQ ID NO: 34120 - DNA, 21 bp, Homo sapiens
tttttaaaaarttagcatatt

SEQ ID NO: 34121 - DNA, 21 bp, Homo sapiens
tttgaaggaakcaatggtact

SEQ ID NO: 34122 - DNA, 21 bp, Homo sapiens
gttctgcgttrttattattct

SEQ ID NO: 34123 - DNA, 21 bp, Homo sapiens
tcgaaggtgcrctacaattcc

SEQ ID NO: 34124 - DNA, 21 bp, Homo sapiens
ttctgcatgaragcctacttg

SEQ ID NO: 34125 - DNA, 21 bp, Homo sapiens
tatgaacataygggggtgggg

SEQ ID NO: 34126 - DNA, 21 bp, Homo sapiens
agccacagcartgcacctttg

SEQ ID NO: 34127 - DNA, 21 bp, Homo sapiens
acaaactaacmcctcaatcct

SEQ ID NO: 34128 - DNA, 21 bp, Homo sapiens
tttaatggtaycttttggcac

SEQ ID NO: 34129 - DNA, 21 bp, Homo sapiens
cctcatataakttagaatttt

SEQ ID NO: 34130 - DNA, 21 bp, Homo sapiens
catccaaaggyaatggcatat

SEQ ID NO: 34131 - DNA, 21 bp, Homo sapiens
aagcactgcarttataatctc

SEQ ID NO: 34132 - DNA, 21 bp, Homo sapiens
agttcagaaaytgtgaatacc

SEQ ID NO: 34133 - DNA, 21 bp, Homo sapiens
ttaatcatctrgtcctagcaa

SEQ ID NO: 34134 - DNA, 21 bp, Homo sapiens
ttgccaataaygtattagaag

SEQ ID NO: 34135 - DNA, 21 bp, Homo sapiens
tcaactattayacgatactgt

SEQ ID NO: 34136 - DNA, 21 bp, Homo sapiens
aatacatttcrgtgccacttt

SEQ ID NO: 34137 - DNA, 21 bp, Homo sapiens
tttaacaatgwtaaaaaccaa

SEQ ID NO: 34138 - DNA, 21 bp, Homo sapiens
cagtgtgcagrgggagacgca

SEQ ID NO: 34139 - DNA, 21 bp, Homo sapiens
gtaattctccrtaagaattaa

SEQ ID NO: 34140 - DNA, 21 bp, Homo sapiens
aaagctgtgarttgataacat

SEQ ID NO: 34141 - DNA, 21 bp, Homo sapiens
aaactcagttytcaaatgatc

SEQ ID NO: 34142 - DNA, 21 bp, Homo sapiens
tcagcagcacyctattctctg

SEQ ID NO: 34143 - DNA, 21 bp, Homo sapiens
tgaccaaacaytcatgagaaa

SEQ ID NO: 34144 - DNA, 21 bp, Homo sapiens
gaaaatatatkggaccaattt

SEQ ID NO: 34145 - DNA, 21 bp, Homo sapiens
gaaaggtaggsaaatgtcaac

SEQ ID NO: 34146 - DNA, 21 bp, Homo sapiens
attttggctayattttagtaa

SEQ ID NO: 34147 - DNA, 21 bp, Homo sapiens
tgttctttctstttttccatc

SEQ ID NO: 34148 - DNA, 21 bp, Homo sapiens
ccattaatagwttttccaata

SEQ ID NO: 34149 - DNA, 21 bp, Homo sapiens
catggaaacayagcacagcta

SEQ ID NO: 34150 - DNA, 21 bp, Homo sapiens
tttccagtagytatttctgaa

SEQ ID NO: 34151 - DNA, 21 bp, Homo sapiens
cattatctacrttaaaagtta

SEQ ID NO: 34152 - DNA, 21 bp, Homo sapiens
aaatatggtasagcccccaat

SEQ ID NO: 34153 - DNA, 21 bp, Homo sapiens
aatcagctggytgtggtggtt

SEQ ID NO: 34154 - DNA, 21 bp, Homo sapiens
ggtattagttyaggactttgt

SEQ ID NO: 34155 - DNA, 21 bp, Homo sapiens
aggaatgagcsgtgcaagcat

SEQ ID NO: 34156 - DNA, 21 bp, Homo sapiens
atgaacaatgygtgtgctgta

SEQ ID NO: 34157 - DNA, 21 bp, Homo sapiens
ccagttgctaytggaaatgtg

SEQ ID NO: 34158 - DNA, 21 bp, Homo sapiens
accctatgcayacagagtgac

SEQ ID NO: 34159 - DNA, 21 bp, Homo sapiens
agtaatagtgrggtttgctgc

SEQ ID NO: 34160 - DNA, 21 bp, Homo sapiens
gtaatacttgktagttctatc

SEQ ID NO: 34161 - DNA, 21 bp, Homo sapiens
tgtgaccagawgtatgagaga

SEQ ID NO: 34162 - DNA, 21 bp, Homo sapiens
atttaacatawtttttcaagt

SEQ ID NO: 34163 - DNA, 21 bp, Homo sapiens
tgaaaatctcrgtagtttgct

SEQ ID NO: 34164 - DNA, 21 bp, Homo sapiens
tcatagacaayacagataatc

SEQ ID NO: 34165 - DNA, 21 bp, Homo sapiens
caagccagccrtatttgggaa

SEQ ID NO: 34166 - DNA, 21 bp, Homo sapiens
ttatcttttcytctatcaatc

SEQ ID NO: 34167 - DNA, 21 bp, Homo sapiens
ctctagaagcrtggggtgctc

SEQ ID NO: 34168 - DNA, 21 bp, Homo sapiens
gttagaaatgrgcgaaaataa

SEQ ID NO: 34169 - DNA, 21 bp, Homo sapiens
aaagattgaayagaacccaag

SEQ ID NO: 34170 - DNA, 21 bp, Homo sapiens
cataccaaaamggctacatat

SEQ ID NO: 34171 - DNA, 21 bp, Homo sapiens
tcagtaaattmggagcagaaa

SEQ ID NO: 34172 - DNA, 21 bp, Homo sapiens
taatttatggwatttttttca

SEQ ID NO: 34173 - DNA, 21 bp, Homo sapiens
ctttatggaayggagagttaa

SEQ ID NO: 34174 - DNA, 21 bp, Homo sapiens
tcaaaatttaytgggaaagaa

SEQ ID NO: 34175 - DNA, 21 bp, Homo sapiens
caggtaagacratagaagcag

SEQ ID NO: 34176 - DNA, 21 bp, Homo sapiens
gtacaacatgyaactcggatg

SEQ ID NO: 34177 - DNA, 21 bp, Homo sapiens
gcagataaaartcttctcaag

SEQ ID NO: 34178 - DNA, 21 bp, Homo sapiens
ttgttatgctrgtagatcaca

SEQ ID NO: 34179 - DNA, 21 bp, Homo sapiens
gggtccactcsagaccctagt

SEQ ID NO: 34180 - DNA, 21 bp, Homo sapiens
tgccggttaarcctcctactg

SEQ ID NO: 34181 - DNA, 21 bp, Homo sapiens
agcattctgtwtctgctccat

SEQ ID NO: 34182 - DNA, 21 bp, Homo sapiens
ttcaaacttcygcagtggaaa

SEQ ID NO: 34183 - DNA, 21 bp, Homo sapiens
agcctaactgrtttgggagaa

SEQ ID NO: 34184 - DNA, 21 bp, Homo sapiens
tacaactattmcgagttatgt

SEQ ID NO: 34185 - DNA, 21 bp, Homo sapiens
aatagggtttygaaaatgaca

SEQ ID NO: 34186 - DNA, 21 bp, Homo sapiens
gaattttgccygtcttatcta

SEQ ID NO: 34187 - DNA, 21 bp, Homo sapiens
tggcaaccctwgtaaaacttc

SEQ ID NO: 34188 - DNA, 21 bp, Homo sapiens
tttccacagtrcccacttatt

SEQ ID NO: 34189 - DNA, 21 bp, Homo sapiens
actgaagagtytgctattgta

SEQ ID NO: 34190 - DNA, 21 bp, Homo sapiens
ctctgtgaccygtcccttcaa

SEQ ID NO: 34191 - DNA, 21 bp, Homo sapiens
gaggttcccakaaaatgcttg

SEQ ID NO: 34192 - DNA, 21 bp, Homo sapiens
cttgtgtgcaracactactgc

SEQ ID NO: 34193 - DNA, 21 bp, Homo sapiens
tttattttcartgttgacctt

SEQ ID NO: 34194 - DNA, 21 bp, Homo sapiens
tgggtatctgytttataagga

SEQ ID NO: 34195 - DNA, 21 bp, Homo sapiens
tgaggactggyggcagcaaca

SEQ ID NO: 34196 - DNA, 21 bp, Homo sapiens
tcccattgggracacagggat

SEQ ID NO: 34197 - DNA, 21 bp, Homo sapiens
tgctgaaagakaagggcttct

SEQ ID NO: 34198 - DNA, 21 bp, Homo sapiens
tgttttacccratgagtatgc

SEQ ID NO: 34199 - DNA, 21 bp, Homo sapiens
gctacaatacrttgatgtgtc

SEQ ID NO: 34200 - DNA, 21 bp, Homo sapiens
agttatgttcmgaaactaaaa

SEQ ID NO: 34201 - DNA, 21 bp, Homo sapiens
acagtccctakaagttgcaaa

SEQ ID NO: 34202 - DNA, 21 bp, Homo sapiens
tcctggcacayaggaagccct

SEQ ID NO: 34203 - DNA, 21 bp, Homo sapiens
tgcactgcaaygaaacagtaa

SEQ ID NO: 34204 - DNA, 21 bp, Homo sapiens
agtgggcagcrgacagagatt

SEQ ID NO: 34205 - DNA, 21 bp, Homo sapiens
aggattggccrgtttgaataa

SEQ ID NO: 34206 - DNA, 21 bp, Homo sapiens
caagtttggakgtgctccatc

SEQ ID NO: 34207 - DNA, 21 bp, Homo sapiens
tctaaaattarttgactgtat

SEQ ID NO: 34208 - DNA, 21 bp, Homo sapiens
tatagcttctstttctttgct

SEQ ID NO: 34209 - DNA, 21 bp, Homo sapiens
ataggagctaygcatagtttc

SEQ ID NO: 34210 - DNA, 21 bp, Homo sapiens
ggtaatggttrcacaatactg

SEQ ID NO: 34211 - DNA, 21 bp, Homo sapiens
aatagaaaagygggcctaaga

SEQ ID NO: 34212 - DNA, 21 bp, Homo sapiens
tgatgtattcrtttctgcaaa

SEQ ID NO: 34213 - DNA, 21 bp, Homo sapiens
tgcttgttcartccaatgcca

SEQ ID NO: 34214 - DNA, 21 bp, Homo sapiens
agtttggctcyatgggtaaat

SEQ ID NO: 34215 - DNA, 21 bp, Homo sapiens
cccaggctccrgacaccttgc

SEQ ID NO: 34216 - DNA, 21 bp, Homo sapiens
aggattccttrataaacatat

SEQ ID NO: 34217 - DNA, 21 bp, Homo sapiens
aaaacacttamctttgtaaga

SEQ ID NO: 34218 - DNA, 21 bp, Homo sapiens
cttcttgggtyacacccaaag

SEQ ID NO: 34219 - DNA, 21 bp, Homo sapiens
gatttgaaccrgagcaatgtg

SEQ ID NO: 34220 - DNA, 21 bp, Homo sapiens
cctgagatgargataacaagg

SEQ ID NO: 34221 - DNA, 21 bp, Homo sapiens
gtttcaatttrcataatcata

SEQ ID NO: 34222 - DNA, 21 bp, Homo sapiens
tgtttgttcayatacttatta

SEQ ID NO: 34223 - DNA, 21 bp, Homo sapiens
ttagtttctcyaacactaagg

SEQ ID NO: 34224 - DNA, 21 bp, Homo sapiens
gttgtaatccwataccagcaa

SEQ ID NO: 34225 - DNA, 21 bp, Homo sapiens
aaagaattggrgtgtgggata

SEQ ID NO: 34226 - DNA, 21 bp, Homo sapiens
acacagaaatragaggtgttc

SEQ ID NO: 34227 - DNA, 21 bp, Homo sapiens
agggaaagaaragaatgtctt

SEQ ID NO: 34228 - DNA, 21 bp, Homo sapiens
taccttttctratattccaca

SEQ ID NO: 34229 - DNA, 21 bp, Homo sapiens
ggactatcaargccaaaatgt

SEQ ID NO: 34230 - DNA, 21 bp, Homo sapiens
ctctccacccyatctaacact

SEQ ID NO: 34231 - DNA, 21 bp, Homo sapiens
tctttgctccrcacccaccta

SEQ ID NO: 34232 - DNA, 21 bp, Homo sapiens
acagcttaccsttaagttcct

SEQ ID NO: 34233 - DNA, 21 bp, Homo sapiens
ttagccgtgtrtttacaaagt

SEQ ID NO: 34234 - DNA, 21 bp, Homo sapiens
cttgctgtccrtaggtgactt

SEQ ID NO: 34235 - DNA, 21 bp, Homo sapiens
aaaatctatayatgtggaggc

SEQ ID NO: 34236 - DNA, 21 bp, Homo sapiens
attgaaaagcrtagtaggaaa

SEQ ID NO: 34237 - DNA, 21 bp, Homo sapiens
aatgggtaaaktacatgtcat

SEQ ID NO: 34238 - DNA, 21 bp, Homo sapiens
tgggttgcaasctgggtacca

SEQ ID NO: 34239 - DNA, 21 bp, Homo sapiens
ccctgccccaytctttcctct

SEQ ID NO: 34240 - DNA, 21 bp, Homo sapiens
tgattagcctktttcatttta

SEQ ID NO: 34241 - DNA, 21 bp, Homo sapiens
tttatgcaaayactctaagcg

SEQ ID NO: 34242 - DNA, 21 bp, Homo sapiens
tcatcttaatyatcaaatccc

SEQ ID NO: 34243 - DNA, 21 bp, Homo sapiens
ggacattgctragaagaaaga

SEQ ID NO: 34244 - DNA, 21 bp, Homo sapiens
tttttacggtrtgcttgacac

SEQ ID NO: 34245 - DNA, 21 bp, Homo sapiens
ccaaggcagaraagtgggttg

SEQ ID NO: 34246 - DNA, 21 bp, Homo sapiens
aatgaataacraatttgggat

SEQ ID NO: 34247 - DNA, 21 bp, Homo sapiens
ccggatgcgarttctgcgccg

SEQ ID NO: 34248 - DNA, 21 bp, Homo sapiens
aacgacacttscagtgccaag

SEQ ID NO: 34249 - DNA, 21 bp, Homo sapiens
gcaggcaccckggaaaatttc

SEQ ID NO: 34250 - DNA, 21 bp, Homo sapiens
gtcttttctcygatattccta

SEQ ID NO: 34251 - DNA, 21 bp, Homo sapiens
gggatatcaaygaacaaaggc

SEQ ID NO: 34252 - DNA, 21 bp, Homo sapiens
gttataactcmattcttagaa

SEQ ID NO: 34253 - DNA, 21 bp, Homo sapiens
ttcagtttgaycagaaagttt

SEQ ID NO: 34254 - DNA, 21 bp, Homo sapiens
atatctgacakgctccaaaaa

SEQ ID NO: 34255 - DNA, 21 bp, Homo sapiens
ttgatgtatgyaaaaaataag

SEQ ID NO: 34256 - DNA, 21 bp, Homo sapiens
ccagaggaagrgagagggaca

SEQ ID NO: 34257 - DNA, 21 bp, Homo sapiens
actctaaaaawttggcttgct

SEQ ID NO: 34258 - DNA, 21 bp, Homo sapiens
aataaatgacyattaaacgtg

SEQ ID NO: 34259 - DNA, 21 bp, Homo sapiens
atcttgatagytttaatgatc

SEQ ID NO: 34260 - DNA, 21 bp, Homo sapiens
acatgcacatrtgcacacatt

SEQ ID NO: 34261 - DNA, 21 bp, Homo sapiens
tatgagctgtrgaggcatggc

SEQ ID NO: 34262 - DNA, 21 bp, Homo sapiens
ttaattttccrttttctttct

SEQ ID NO: 34263 - DNA, 21 bp, Homo sapiens
tgcaataattytgttatttag

SEQ ID NO: 34264 - DNA, 21 bp, Homo sapiens
ttcccttatgrccttctatac

SEQ ID NO: 34265 - DNA, 21 bp, Homo sapiens
aatgacatatrtggtacatag

SEQ ID NO: 34266 - DNA, 21 bp, Homo sapiens
tatgcaggcawcctttttatt

SEQ ID NO: 34267 - DNA, 21 bp, Homo sapiens
tttcaaaattrttttggctat

SEQ ID NO: 34268 - DNA, 21 bp, Homo sapiens
tctgccagccyagtgcttgag

SEQ ID NO: 34269 - DNA, 21 bp, Homo sapiens
aatgccatgamaattgaaatc

SEQ ID NO: 34270 - DNA, 21 bp, Homo sapiens
ctttatgagtyatagttgttg

SEQ ID NO: 34271 - DNA, 21 bp, Homo sapiens
agacttcaaaygacacatttc

SEQ ID NO: 34272 - DNA, 21 bp, Homo sapiens
attttaacatyatctttatct

SEQ ID NO: 34273 - DNA, 21 bp, Homo sapiens
acaaataaaayatcattcttt

SEQ ID NO: 34274 - DNA, 21 bp, Homo sapiens
tgactgatgcrtaaggcacaa

SEQ ID NO: 34275 - DNA, 21 bp, Homo sapiens
taccattctgycatgttttga

SEQ ID NO: 34276 - DNA, 21 bp, Homo sapiens
ctccttatgtrcattgtattc

SEQ ID NO: 34277 - DNA, 21 bp, Homo sapiens
ctgaaacaacrcaagcaggga

SEQ ID NO: 34278 - DNA, 21 bp, Homo sapiens
ctcaaagtgtstacatcactc

SEQ ID NO: 34279 - DNA, 21 bp, Homo sapiens
tgcttttgtgytatttcaagt

SEQ ID NO: 34280 - DNA, 21 bp, Homo sapiens
ggcacagagargtgcttttcc

SEQ ID NO: 34281 - DNA, 21 bp, Homo sapiens
atattttactkctaacctctt

SEQ ID NO: 34282 - DNA, 21 bp, Homo sapiens
atgtacaaaastgcccatcaa

SEQ ID NO: 34283 - DNA, 21 bp, Homo sapiens
aaatgttaacrgagaacaagt

SEQ ID NO: 34284 - DNA, 21 bp, Homo sapiens
ttcacttttarataaatcctt

SEQ ID NO: 34285 - DNA, 21 bp, Homo sapiens
gagaagctaamacaggctatc

SEQ ID NO: 34286 - DNA, 21 bp, Homo sapiens
aacattcaackgtgctgactt

SEQ ID NO: 34287 - DNA, 21 bp, Homo sapiens
agaagccttasagaaggattc

SEQ ID NO: 34288 - DNA, 21 bp, Homo sapiens
gcttcctgtcstcattttatc

SEQ ID NO: 34289 - DNA, 21 bp, Homo sapiens
gagcatgaaayagcaactctg

SEQ ID NO: 34290 - DNA, 21 bp, Homo sapiens
gttattggtcytgctttcata

SEQ ID NO: 34291 - DNA, 21 bp, Homo sapiens
agcaaaaatcmagggtatcta

SEQ ID NO: 34292 - DNA, 21 bp, Homo sapiens
ttatgaagacrtgtattattt

SEQ ID NO: 34293 - DNA, 21 bp, Homo sapiens
aagggcagatrcaataactga

SEQ ID NO: 34294 - DNA, 21 bp, Homo sapiens
tggtacgaacmtcagttaatc

SEQ ID NO: 34295 - DNA, 21 bp, Homo sapiens
agagctccaastgatgatata

SEQ ID NO: 34296 - DNA, 21 bp, Homo sapiens
gcacacaattygtatcttgcc

SEQ ID NO: 34297 - DNA, 21 bp, Homo sapiens
aaatttgaagkcaatgatcat

SEQ ID NO: 34298 - DNA, 21 bp, Homo sapiens
ctcagcatcayctgaagatcc

SEQ ID NO: 34299 - DNA, 21 bp, Homo sapiens
gaaaatagtgmacattgttta

SEQ ID NO: 34300 - DNA, 21 bp, Homo sapiens
aatttactcaraaaaggagaa

SEQ ID NO: 34301 - DNA, 21 bp, Homo sapiens
ttttttcagtrtcacattatt

SEQ ID NO: 34302 - DNA, 21 bp, Homo sapiens
ttagttctcartctttcactt

SEQ ID NO: 34303 - DNA, 21 bp, Homo sapiens
atgcagccccraagaggccca

SEQ ID NO: 34304 - DNA, 21 bp, Homo sapiens
tattcaaccartggtgtctgc

SEQ ID NO: 34305 - DNA, 21 bp, Homo sapiens
gttaacccttmatttctttct

SEQ ID NO: 34306 - DNA, 21 bp, Homo sapiens
tggccatactstgtttttgtg

SEQ ID NO: 34307 - DNA, 21 bp, Homo sapiens
ttgtttagtgwtgtctttaga

SEQ ID NO: 34308 - DNA, 21 bp, Homo sapiens
acaagatggtktgtacatccc

SEQ ID NO: 34309 - DNA, 21 bp, Homo sapiens
tataacaaggrgtgtacaccc

SEQ ID NO: 34310 - DNA, 21 bp, Homo sapiens
ttaaagtatcytctgtttcat

SEQ ID NO: 34311 - DNA, 21 bp, Homo sapiens
tggacactctraagagcagat

SEQ ID NO: 34312 - DNA, 21 bp, Homo sapiens
ttgaaatattrtaatagaaag

SEQ ID NO: 34313 - DNA, 21 bp, Homo sapiens
gcttccctgtkaccccctaag

SEQ ID NO: 34314 - DNA, 21 bp, Homo sapiens
gagttcctgcytcagatttct

SEQ ID NO: 34315 - DNA, 21 bp, Homo sapiens
tggaggaagayggtgcaccta

SEQ ID NO: 34316 - DNA, 21 bp, Homo sapiens
actaaactgarccctgacaat

SEQ ID NO: 34317 - DNA, 21 bp, Homo sapiens
agatttggctmtgaggctata

SEQ ID NO: 34318 - DNA, 21 bp, Homo sapiens
atggtcattcmttaaagaaga

SEQ ID NO: 34319 - DNA, 21 bp, Homo sapiens
aaggcactgaraaatgggcac

SEQ ID NO: 34320 - DNA, 21 bp, Homo sapiens
agttcacgctsaaccacccaa

SEQ ID NO: 34321 - DNA, 21 bp, Homo sapiens
tgtgtccactstactgttgat

SEQ ID NO: 34322 - DNA, 21 bp, Homo sapiens
cccaacatcayggcattttgt

SEQ ID NO: 34323 - DNA, 21 bp, Homo sapiens
gaaccagttckccataatgta

SEQ ID NO: 34324 - DNA, 21 bp, Homo sapiens
catctgaatamcttcaccacc

SEQ ID NO: 34325 - DNA, 21 bp, Homo sapiens
ctctaagatawacttcatccg

SEQ ID NO: 34326 - DNA, 21 bp, Homo sapiens
tcagacctggragtaaaggct

SEQ ID NO: 34327 - DNA, 21 bp, Homo sapiens
ctggaataatmccccccacga

SEQ ID NO: 34328 - DNA, 21 bp, Homo sapiens
aatgcattagygcatagctgg

SEQ ID NO: 34329 - DNA, 21 bp, Homo sapiens
gtgttcttaasggccaaacac

SEQ ID NO: 34330 - DNA, 21 bp, Homo sapiens
gttagatgttytacctaggat

SEQ ID NO: 34331 - DNA, 21 bp, Homo sapiens
tccaaaaaccrgaacatgact

SEQ ID NO: 34332 - DNA, 21 bp, Homo sapiens
atgccaggcargccacactgt

SEQ ID NO: 34333 - DNA, 21 bp, Homo sapiens
attcaagcacsgaacattcag

SEQ ID NO: 34334 - DNA, 21 bp, Homo sapiens
ctgtctccacrcccccaaaaa

SEQ ID NO: 34335 - DNA, 21 bp, Homo sapiens
attaatcatgwaagtgagtgc

SEQ ID NO: 34336 - DNA, 21 bp, Homo sapiens
ttcttagagtrctgaattccc

SEQ ID NO: 34337 - DNA, 21 bp, Homo sapiens
gtaaatggtasagggaacctc

SEQ ID NO: 34338 - DNA, 21 bp, Homo sapiens
actattcctawgaaactacca

SEQ ID NO: 34339 - DNA, 21 bp, Homo sapiens
ctcactaaagrcatcttggaa

SEQ ID NO: 34340 - DNA, 21 bp, Homo sapiens
ggaatagttcygcacttggtc

SEQ ID NO: 34341 - DNA, 21 bp, Homo sapiens
agaatgacacrcacgccacca

SEQ ID NO: 34342 - DNA, 21 bp, Homo sapiens
ttgccttaatkatttattctg

SEQ ID NO: 34343 - DNA, 21 bp, Homo sapiens
actcaactctrcaagacagtg

SEQ ID NO: 34344 - DNA, 21 bp, Homo sapiens
tgaagaacaawggaataatta

SEQ ID NO: 34345 - DNA, 21 bp, Homo sapiens
aggcatgagartatctctgcc

SEQ ID NO: 34346 - DNA, 21 bp, Homo sapiens
agctgacttgygctccccctc

SEQ ID NO: 34347 - DNA, 21 bp, Homo sapiens
caatccttcascaacgcccgt

SEQ ID NO: 34348 - DNA, 21 bp, Homo sapiens
gaagaaggctmcgtgacaaag

SEQ ID NO: 34349 - DNA, 21 bp, Homo sapiens
ggaggaatgasgtaccgacgg

SEQ ID NO: 34350 - DNA, 21 bp, Homo sapiens
tgcacagtggycttaaaagta

SEQ ID NO: 34351 - DNA, 21 bp, Homo sapiens
cctagagtgcycaagaatgta

SEQ ID NO: 34352 - DNA, 21 bp, Homo sapiens
atgccaagtargagtcctttt

SEQ ID NO: 34353 - DNA, 21 bp, Homo sapiens
gtgtgacatastaatttacag

SEQ ID NO: 34354 - DNA, 21 bp, Homo sapiens
atccttgctcytaacaagatt

SEQ ID NO: 34355 - DNA, 21 bp, Homo sapiens
ctctgagctgsgtacaccgta

SEQ ID NO: 34356 - DNA, 21 bp, Homo sapiens
gtaaattccayagtgtagcca

SEQ ID NO: 34357 - DNA, 21 bp, Homo sapiens
ggacaatgggrgaaatgctga

SEQ ID NO: 34358 - DNA, 21 bp, Homo sapiens
ggttgagtatsccttgtgtga

SEQ ID NO: 34359 - DNA, 21 bp, Homo sapiens
ccatcagcctygctatcctaa

SEQ ID NO: 34360 - DNA, 21 bp, Homo sapiens
ccgaagaaacygttcctccat

SEQ ID NO: 34361 - DNA, 21 bp, Homo sapiens
gtacaagaatmcagtggccgg

SEQ ID NO: 34362 - DNA, 21 bp, Homo sapiens
ttcaatgttayagaagcgttc

SEQ ID NO: 34363 - DNA, 21 bp, Homo sapiens
atttgaaaatytatagataaa

SEQ ID NO: 34364 - DNA, 21 bp, Homo sapiens
tgtgattatcygcagtgtgaa

SEQ ID NO: 34365 - DNA, 21 bp, Homo sapiens
ctctatcattrtgaactcaca

SEQ ID NO: 34366 - DNA, 21 bp, Homo sapiens
gtctcatggcrcttggtggca

SEQ ID NO: 34367 - DNA, 21 bp, Homo sapiens
aaaaccagaakctccaagatt

SEQ ID NO: 34368 - DNA, 21 bp, Homo sapiens
agtgccgtcaygaagggcttg

SEQ ID NO: 34369 - DNA, 21 bp, Homo sapiens
ctctttcttcyagccctgcgt

SEQ ID NO: 34370 - DNA, 21 bp, Homo sapiens
aatccctatayagccaaggtt

SEQ ID NO: 34371 - DNA, 21 bp, Homo sapiens
cacatctcaasccccaatgct

SEQ ID NO: 34372 - DNA, 21 bp, Homo sapiens
aactactccayagcacatggg

SEQ ID NO: 34373 - DNA, 21 bp, Homo sapiens
ataaggagctrgaatagtaac

SEQ ID NO: 34374 - DNA, 21 bp, Homo sapiens
cgcagcaactrtttatttggg

SEQ ID NO: 34375 - DNA, 21 bp, Homo sapiens
ccaggagatgrcaccttcaca

SEQ ID NO: 34376 - DNA, 21 bp, Homo sapiens
catagattctyattgtcacat

SEQ ID NO: 34377 - DNA, 21 bp, Homo sapiens
ccaaagggagrtaggaatgct

SEQ ID NO: 34378 - DNA, 21 bp, Homo sapiens
tgcatgtcacrtaaaagagga

SEQ ID NO: 34379 - DNA, 21 bp, Homo sapiens
aggaggtgccrtaagagctga

SEQ ID NO: 34380 - DNA, 21 bp, Homo sapiens
cactcctggcrtatctccatc

SEQ ID NO: 34381 - DNA, 21 bp, Homo sapiens
ttctctgaatrggctggctct

SEQ ID NO: 34382 - DNA, 21 bp, Homo sapiens
gtttccacttyttggtttttt

SEQ ID NO: 34383 - DNA, 21 bp, Homo sapiens
ctgtgctagayaatccaacat

SEQ ID NO: 34384 - DNA, 21 bp, Homo sapiens
ttttgggggasaggagatttc

SEQ ID NO: 34385 - DNA, 21 bp, Homo sapiens
tttatttttargtcaaaagca

SEQ ID NO: 34386 - DNA, 21 bp, Homo sapiens
tcacgcacatyctaacttcat

SEQ ID NO: 34387 - DNA, 21 bp, Homo sapiens
tggccaagaasagttttaagg

SEQ ID NO: 34388 - DNA, 21 bp, Homo sapiens
taattattttwgaggcctcaa

SEQ ID NO: 34389 - DNA, 21 bp, Homo sapiens
ctctgcactaygtctgcaata

SEQ ID NO: 34390 - DNA, 21 bp, Homo sapiens
caaaattttgraattgagaaa

SEQ ID NO: 34391 - DNA, 21 bp, Homo sapiens
atcctgttagkgttaaagaaa

SEQ ID NO: 34392 - DNA, 21 bp, Homo sapiens
gcaattccaargcacgttctt

SEQ ID NO: 34393 - DNA, 21 bp, Homo sapiens
tcatggagttygtggtataat

SEQ ID NO: 34394 - DNA, 21 bp, Homo sapiens
actcttcttgrgataagagac

SEQ ID NO: 34395 - DNA, 21 bp, Homo sapiens
aagtgaagagmtctgtaagcc

SEQ ID NO: 34396 - DNA, 21 bp, Homo sapiens
ggagtatcttktattttttct

SEQ ID NO: 34397 - DNA, 21 bp, Homo sapiens
gagaccagggraacaaaataa

SEQ ID NO: 34398 - DNA, 21 bp, Homo sapiens
agagagtctaraaatgccaaa

SEQ ID NO: 34399 - DNA, 21 bp, Homo sapiens
aaataacaccmccttccaccc

SEQ ID NO: 34400 - DNA, 21 bp, Homo sapiens
tttgggaaaaytgagaacatc

SEQ ID NO: 34401 - DNA, 21 bp, Homo sapiens
aaacctaattrtttttaaaaa

SEQ ID NO: 34402 - DNA, 21 bp, Homo sapiens
tttcttttccygacacagact

SEQ ID NO: 34403 - DNA, 21 bp, Homo sapiens
ccactcttttmtttcctctat

SEQ ID NO: 34404 - DNA, 21 bp, Homo sapiens
cttggggaaamtgcatgagtt

SEQ ID NO: 34405 - DNA, 21 bp, Homo sapiens
agactattttycatgtaattt

SEQ ID NO: 34406 - DNA, 21 bp, Homo sapiens
ttctgggtgtytacagtgtac

SEQ ID NO: 34407 - DNA, 21 bp, Homo sapiens
catgtctaagrtgtttaagaa

SEQ ID NO: 34408 - DNA, 21 bp, Homo sapiens
tgatgccaatygatactctga

SEQ ID NO: 34409 - DNA, 21 bp, Homo sapiens
tggggctcccrgtgtctcagg

SEQ ID NO: 34410 - DNA, 21 bp, Homo sapiens
ttatactgtcytgccattcta

SEQ ID NO: 34411 - DNA, 21 bp, Homo sapiens
aaaagctttcrattattcttt

SEQ ID NO: 34412 - DNA, 21 bp, Homo sapiens
taacccaggtyggaacagagc

SEQ ID NO: 34413 - DNA, 21 bp, Homo sapiens
gcccagagtgmcttaataaaa

SEQ ID NO: 34414 - DNA, 21 bp, Homo sapiens
cctgtcgctgmatagttcctg

SEQ ID NO: 34415 - DNA, 21 bp, Homo sapiens
aaccattacaraaattattca

SEQ ID NO: 34416 - DNA, 21 bp, Homo sapiens
ataacatgcaraagtataagt

SEQ ID NO: 34417 - DNA, 21 bp, Homo sapiens
ccactctcttwcttgtttcct

SEQ ID NO: 34418 - DNA, 21 bp, Homo sapiens
tgccaatattyctaggaagta

SEQ ID NO: 34419 - DNA, 21 bp, Homo sapiens
ctgaaactatrtaattctcac

SEQ ID NO: 34420 - DNA, 21 bp, Homo sapiens
gaaaagaaaayctggcatttt

SEQ ID NO: 34421 - DNA, 21 bp, Homo sapiens
gttttacctgkcctgatccct

SEQ ID NO: 34422 - DNA, 21 bp, Homo sapiens
atctaattgcrgggtcaccca

SEQ ID NO: 34423 - DNA, 21 bp, Homo sapiens
tggggagaatsgttaaatcat

SEQ ID NO: 34424 - DNA, 21 bp, Homo sapiens
gggtcactaarctcacagaag

SEQ ID NO: 34425 - DNA, 21 bp, Homo sapiens
ccataggtatygacgagtgtc

SEQ ID NO: 34426 - DNA, 21 bp, Homo sapiens
ctgggtggggscagtcggagg

SEQ ID NO: 34427 - DNA, 21 bp, Homo sapiens
aggcagaaggsaggcagggag

SEQ ID NO: 34428 - DNA, 21 bp, Homo sapiens
ctgctccccamcaaatgcaac

SEQ ID NO: 34429 - DNA, 21 bp, Homo sapiens
ggccttgaaaragagggaaag

SEQ ID NO: 34430 - DNA, 21 bp, Homo sapiens
ttactaggatrgcagtactcc

SEQ ID NO: 34431 - DNA, 21 bp, Homo sapiens
caaaaaaaacygcttggcaaa

SEQ ID NO: 34432 - DNA, 21 bp, Homo sapiens
ttttatgactmtttgcctact

SEQ ID NO: 34433 - DNA, 21 bp, Homo sapiens
ctcacctcagwcacttgcaat

SEQ ID NO: 34434 - DNA, 21 bp, Homo sapiens
ggtgacctgcycagggtctct

SEQ ID NO: 34435 - DNA, 21 bp, Homo sapiens
tgaatgaatayacaaacgcag

SEQ ID NO: 34436 - DNA, 21 bp, Homo sapiens
ttcctgtgctscgagtttacc

SEQ ID NO: 34437 - DNA, 21 bp, Homo sapiens
tagatggctgkgtctcccagt

SEQ ID NO: 34438 - DNA, 21 bp, Homo sapiens
aaatcagacaytggatctcaa

SEQ ID NO: 34439 - DNA, 21 bp, Homo sapiens
gtcttcagctkcattgtctag

SEQ ID NO: 34440 - DNA, 21 bp, Homo sapiens
agaaggaatgyccccttaaac

SEQ ID NO: 34441 - DNA, 21 bp, Homo sapiens
tatgctacttyatggcagccc

SEQ ID NO: 34442 - DNA, 21 bp, Homo sapiens
gcagttattawagttatttga

SEQ ID NO: 34443 - DNA, 21 bp, Homo sapiens
ggcagtatctrgaagatgtag

SEQ ID NO: 34444 - DNA, 21 bp, Homo sapiens
tacttaatacwgagggaaatt

SEQ ID NO: 34445 - DNA, 21 bp, Homo sapiens
cctgctagctycttcctgagc

SEQ ID NO: 34446 - DNA, 21 bp, Homo sapiens
ttcatcctcawgctccaggta

SEQ ID NO: 34447 - DNA, 21 bp, Homo sapiens
ggatgctacarcctcacaaag

SEQ ID NO: 34448 - DNA, 21 bp, Homo sapiens
agagaagtggraaatacgatt

SEQ ID NO: 34449 - DNA, 21 bp, Homo sapiens
ggttggtaacrtggactagtc

SEQ ID NO: 34450 - DNA, 21 bp, Homo sapiens
cagccattctycagcggccgg

SEQ ID NO: 34451 - DNA, 21 bp, Homo sapiens
tgagagttggragggtgaaga

SEQ ID NO: 34452 - DNA, 21 bp, Homo sapiens
cacctctcccyggggccttag

SEQ ID NO: 34453 - DNA, 21 bp, Homo sapiens
aaagcccatcrctgtaaagca

SEQ ID NO: 34454 - DNA, 21 bp, Homo sapiens
ccttctttccraatctgttcc

SEQ ID NO: 34455 - DNA, 21 bp, Homo sapiens
aaggccccccsagagagtctg

SEQ ID NO: 34456 - DNA, 21 bp, Homo sapiens
ggagaggtgawtcagcaggcc

SEQ ID NO: 34457 - DNA, 21 bp, Homo sapiens
atgaagtgctrtgtaatgttc

SEQ ID NO: 34458 - DNA, 21 bp, Homo sapiens
aaaaagacacrccctcattca

SEQ ID NO: 34459 - DNA, 21 bp, Homo sapiens
gcctctagggracaaacaagc

SEQ ID NO: 34460 - DNA, 21 bp, Homo sapiens
ggggacaaacrgacagacagg

SEQ ID NO: 34461 - DNA, 21 bp, Homo sapiens
ccacattcagraaaatccaag

SEQ ID NO: 34462 - DNA, 21 bp, Homo sapiens
ctcacagtgcwgggtgaggct

SEQ ID NO: 34463 - DNA, 21 bp, Homo sapiens
cattgcatctsgtggcgtcac

SEQ ID NO: 34464 - DNA, 21 bp, Homo sapiens
gatgcattggwggggcagagg

SEQ ID NO: 34465 - DNA, 21 bp, Homo sapiens
atctctgaccycttattctgc

SEQ ID NO: 34466 - DNA, 21 bp, Homo sapiens
ccagagtttgytctagagata

SEQ ID NO: 34467 - DNA, 21 bp, Homo sapiens
actgtctctgyctcctcccac

SEQ ID NO: 34468 - DNA, 21 bp, Homo sapiens
tctcaaaaaawaaataaataa

SEQ ID NO: 34469 - DNA, 21 bp, Homo sapiens
agaggggggtrcagggcccca

SEQ ID NO: 34470 - DNA, 21 bp, Homo sapiens
aagtaagaagytcccaagacc

SEQ ID NO: 34471 - DNA, 21 bp, Homo sapiens
tcaaccattastcaatcagct

SEQ ID NO: 34472 - DNA, 21 bp, Homo sapiens
atgctctaaawcgttttgtgg

SEQ ID NO: 34473 - DNA, 21 bp, Homo sapiens
ggagtctggaycagagagccc

SEQ ID NO: 34474 - DNA, 21 bp, Homo sapiens
ttgtggcaccytgacctcttg

SEQ ID NO: 34475 - DNA, 21 bp, Homo sapiens
gtgtgagtatsgggggggcat

SEQ ID NO: 34476 - DNA, 21 bp, Homo sapiens
tgaaggaacamttaaggaaga

SEQ ID NO: 34477 - DNA, 21 bp, Homo sapiens
ccagggtagcycggagaggaa

SEQ ID NO: 34478 - DNA, 21 bp, Homo sapiens
acagaattttyttaaaaaatg

SEQ ID NO: 34479 - DNA, 21 bp, Homo sapiens
agctgaccctygctcttatct

SEQ ID NO: 34480 - DNA, 21 bp, Homo sapiens
ttgctgtatargaacaggaat

SEQ ID NO: 34481 - DNA, 21 bp, Homo sapiens
caacacatgcrctgcacacat

SEQ ID NO: 34482 - DNA, 21 bp, Homo sapiens
gatgaaggtgmcaccaattct

SEQ ID NO: 34483 - DNA, 21 bp, Homo sapiens
atgtttagtcrttgatttttc

SEQ ID NO: 34484 - DNA, 21 bp, Homo sapiens
agtcactgccytggaattttc

SEQ ID NO: 34485 - DNA, 21 bp, Homo sapiens
gtgttggaagscttccatgca

SEQ ID NO: 34486 - DNA, 21 bp, Homo sapiens
gcagttctccytgggtcttct

SEQ ID NO: 34487 - DNA, 21 bp, Homo sapiens
cacaagggcayaatatcagaa

SEQ ID NO: 34488 - DNA, 21 bp, Homo sapiens
ctcttctcagrgaaaccagca

SEQ ID NO: 34489 - DNA, 21 bp, Homo sapiens
tgcgtgaccayggttcattca

SEQ ID NO: 34490 - DNA, 21 bp, Homo sapiens
ctgtgaaaccrcatcctaggc

SEQ ID NO: 34491 - DNA, 21 bp, Homo sapiens
atcatgctgcmcctgccttcc

SEQ ID NO: 34492 - DNA, 21 bp, Homo sapiens
ccagtccatamgcactaagac

SEQ ID NO: 34493 - DNA, 21 bp, Homo sapiens
tccttgttctyaccattaaag

SEQ ID NO: 34494 - DNA, 21 bp, Homo sapiens
gcatcacgttsgagttactat

SEQ ID NO: 34495 - DNA, 21 bp, Homo sapiens
aattcattcayaaaactataa

SEQ ID NO: 34496 - DNA, 21 bp, Homo sapiens
tgggtcaagckaaatgatttt

SEQ ID NO: 34497 - DNA, 21 bp, Homo sapiens
tcccaccatgwctctcttggc

SEQ ID NO: 34498 - DNA, 21 bp, Homo sapiens
ggctatggatrgagagtattc

SEQ ID NO: 34499 - DNA, 21 bp, Homo sapiens
tctcacctcarctccttaatg

SEQ ID NO: 34500 - DNA, 21 bp, Homo sapiens
cccaggctctyttcctatttt

SEQ ID NO: 34501 - DNA, 21 bp, Homo sapiens
ggcaatattgygctctgggaa

SEQ ID NO: 34502 - DNA, 21 bp, Homo sapiens
ctggatgagckgcaaggcaga

SEQ ID NO: 34503 - DNA, 21 bp, Homo sapiens
aagaacctttyaaatggaaaa

SEQ ID NO: 34504 - DNA, 21 bp, Homo sapiens
caactcactarctgtttttat

SEQ ID NO: 34505 - DNA, 21 bp, Homo sapiens
cagagagtgcrtgctctgtaa

SEQ ID NO: 34506 - DNA, 21 bp, Homo sapiens
aattgtcactktaattcccca

SEQ ID NO: 34507 - DNA, 21 bp, Homo sapiens
tttttcacccrttgtttactc

SEQ ID NO: 34508 - DNA, 21 bp, Homo sapiens
aatggagtgtycctgcaaaaa

SEQ ID NO: 34509 - DNA, 21 bp, Homo sapiens
aaagcacctgrgtcccaaaga

SEQ ID NO: 34510 - DNA, 21 bp, Homo sapiens
ttatcctgctrgacacagtgc

SEQ ID NO: 34511 - DNA, 21 bp, Homo sapiens
accagccacamatcacctagc

SEQ ID NO: 34512 - DNA, 21 bp, Homo sapiens
ccacagacacstttggcagct

SEQ ID NO: 34513 - DNA, 21 bp, Homo sapiens
aaatgctcatrtcagtacaca

SEQ ID NO: 34514 - DNA, 21 bp, Homo sapiens
ctggctgtctygccatctaaa

SEQ ID NO: 34515 - DNA, 21 bp, Homo sapiens
atgtactgccytgggtctcct

SEQ ID NO: 34516 - DNA, 21 bp, Homo sapiens
gcaggctaatwtactggcctg

SEQ ID NO: 34517 - DNA, 21 bp, Homo sapiens
cttcctgcatrtgacttggtt

SEQ ID NO: 34518 - DNA, 21 bp, Homo sapiens
aggcccatagmtgcaaaaatg

SEQ ID NO: 34519 - DNA, 21 bp, Homo sapiens
ttttctatctrcaaaatgttg

SEQ ID NO: 34520 - DNA, 21 bp, Homo sapiens
tgcccctacamcctacttgga

SEQ ID NO: 34521 - DNA, 21 bp, Homo sapiens
taaatgttacrctactcattt

SEQ ID NO: 34522 - DNA, 21 bp, Homo sapiens
atatccagttytcaaatgacc

SEQ ID NO: 34523 - DNA, 21 bp, Homo sapiens
taaaacctaarttgcctcatc

SEQ ID NO: 34524 - DNA, 21 bp, Homo sapiens
cattactttaygctatttttc

SEQ ID NO: 34525 - DNA, 21 bp, Homo sapiens
tttgaagaagktgaggcaagc

SEQ ID NO: 34526 - DNA, 21 bp, Homo sapiens
gtgtttccacrgtgtctgggg

SEQ ID NO: 34527 - DNA, 21 bp, Homo sapiens
caccgctacaygctgcctggc

SEQ ID NO: 34528 - DNA, 21 bp, Homo sapiens
ttttgaggtgytgatcctata

SEQ ID NO: 34529 - DNA, 21 bp, Homo sapiens
caggagagaakaggtgggctc

SEQ ID NO: 34530 - DNA, 21 bp, Homo sapiens
ccaattaaatraagcctatta

SEQ ID NO: 34531 - DNA, 21 bp, Homo sapiens
ggcctgagctrtatagggaca

SEQ ID NO: 34532 - DNA, 21 bp, Homo sapiens
ttgtggagctyggggatgtca

SEQ ID NO: 34533 - DNA, 21 bp, Homo sapiens
agacttcttgsggaagatttc

SEQ ID NO: 34534 - DNA, 21 bp, Homo sapiens
accacctccaygagctaaacc

SEQ ID NO: 34535 - DNA, 21 bp, Homo sapiens
acaatgtcctmccatcatttc

SEQ ID NO: 34536 - DNA, 21 bp, Homo sapiens
ttaatttcttyatatattaaa

SEQ ID NO: 34537 - DNA, 21 bp, Homo sapiens
ggcaggcctcygagcaagctc

SEQ ID NO: 34538 - DNA, 21 bp, Homo sapiens
gcaaggaaagygctcaaatgg

SEQ ID NO: 34539 - DNA, 21 bp, Homo sapiens
cttataggccrtttttataat

SEQ ID NO: 34540 - DNA, 21 bp, Homo sapiens
agaaaaggggrtcgcgggtgg

SEQ ID NO: 34541 - DNA, 21 bp, Homo sapiens
tcttagttctsagaatccgcc

SEQ ID NO: 34542 - DNA, 21 bp, Homo sapiens
aggtcatttgkgagaaaattg

SEQ ID NO: 34543 - DNA, 21 bp, Homo sapiens
atcctcccaayctttctgtga

SEQ ID NO: 34544 - DNA, 21 bp, Homo sapiens
agatttactgrtattttgcag

SEQ ID NO: 34545 - DNA, 21 bp, Homo sapiens
gaagacactaraacagagaag

SEQ ID NO: 34546 - DNA, 21 bp, Homo sapiens
cctcacgtctrtggctttgag

SEQ ID NO: 34547 - DNA, 21 bp, Homo sapiens
atacttcactrcaagcaactg

SEQ ID NO: 34548 - DNA, 21 bp, Homo sapiens
ttacattcttrtggagagatg

SEQ ID NO: 34549 - DNA, 21 bp, Homo sapiens
gaggagggtayttggatagga

SEQ ID NO: 34550 - DNA, 21 bp, Homo sapiens
aactgaaataygttatctggg

SEQ ID NO: 34551 - DNA, 21 bp, Homo sapiens
atgtttgtctrttaaatggga

SEQ ID NO: 34552 - DNA, 21 bp, Homo sapiens
agatatttggstgggctgaga

SEQ ID NO: 34553 - DNA, 21 bp, Homo sapiens
ataaagagccmtactttcttg

SEQ ID NO: 34554 - DNA, 21 bp, Homo sapiens
ctctctgagakcctactctta

SEQ ID NO: 34555 - DNA, 21 bp, Homo sapiens
actagctagaytgacgttcct

SEQ ID NO: 34556 - DNA, 21 bp, Homo sapiens
gagtgggaaawcagggcacct

SEQ ID NO: 34557 - DNA, 21 bp, Homo sapiens
tctttaaaacytcattcactg

SEQ ID NO: 34558 - DNA, 21 bp, Homo sapiens
tgctgtagttyaccctcccct

SEQ ID NO: 34559 - DNA, 21 bp, Homo sapiens
agagagtggtrgattgcccaa

SEQ ID NO: 34560 - DNA, 21 bp, Homo sapiens
ctaaagaaatyataagtttat

SEQ ID NO: 34561 - DNA, 21 bp, Homo sapiens
cgtctcatcarggatctccag

SEQ ID NO: 34562 - DNA, 21 bp, Homo sapiens
aagtgcactgmtgctttccag

SEQ ID NO: 34563 - DNA, 21 bp, Homo sapiens
agtaacagtayttgcctcatg

SEQ ID NO: 34564 - DNA, 21 bp, Homo sapiens
atatgctattkaataacatca

SEQ ID NO: 34565 - DNA, 21 bp, Homo sapiens
tgatacttcarttgccatgca

SEQ ID NO: 34566 - DNA, 21 bp, Homo sapiens
tgtgaccatgmctgactttaa

SEQ ID NO: 34567 - DNA, 21 bp, Homo sapiens
gtaaagcagtytgggcttcag

SEQ ID NO: 34568 - DNA, 21 bp, Homo sapiens
agattaggacsagccagtggg

SEQ ID NO: 34569 - DNA, 21 bp, Homo sapiens
cctggagaaasggatgctcca

SEQ ID NO: 34570 - DNA, 21 bp, Homo sapiens
aataggtctcytgttggagac

SEQ ID NO: 34571 - DNA, 21 bp, Homo sapiens
tgtgcagatargttgtacttc

SEQ ID NO: 34572 - DNA, 21 bp, Homo sapiens
tgaataatackgttttcttca

SEQ ID NO: 34573 - DNA, 21 bp, Homo sapiens
tttaaggtcckctttaaaagt

SEQ ID NO: 34574 - DNA, 21 bp, Homo sapiens
agctgttaaartagaactccg

SEQ ID NO: 34575 - DNA, 21 bp, Homo sapiens
ctagaatgccyacccaagcca

SEQ ID NO: 34576 - DNA, 21 bp, Homo sapiens
acattgcattygggtctgcca

SEQ ID NO: 34577 - DNA, 21 bp, Homo sapiens
ctttttaattstcctcgtaag

SEQ ID NO: 34578 - DNA, 21 bp, Homo sapiens
ttctctccaamagctgtcctt

SEQ ID NO: 34579 - DNA, 21 bp, Homo sapiens
ataattccaawagcattatta

SEQ ID NO: 34580 - DNA, 21 bp, Homo sapiens
cttcagataargttgcttttc

SEQ ID NO: 34581 - DNA, 21 bp, Homo sapiens
aatactgtggkcctgacaaag

SEQ ID NO: 34582 - DNA, 21 bp, Homo sapiens
ccagaggagartaaactcggg

SEQ ID NO: 34583 - DNA, 21 bp, Homo sapiens
agatgcctgckgggagactcc

SEQ ID NO: 34584 - DNA, 21 bp, Homo sapiens
aggaaaacccrgtcccacagc

SEQ ID NO: 34585 - DNA, 21 bp, Homo sapiens
gtttctagacrtgatacccga

SEQ ID NO: 34586 - DNA, 21 bp, Homo sapiens
acagacaaccrgtgttctcag

SEQ ID NO: 34587 - DNA, 21 bp, Homo sapiens
aattaaaatgytcctggactt

SEQ ID NO: 34588 - DNA, 21 bp, Homo sapiens
gggtctaacarcagtcatgtt

SEQ ID NO: 34589 - DNA, 21 bp, Homo sapiens
ctgagttcgckctcttttttc

SEQ ID NO: 34590 - DNA, 21 bp, Homo sapiens
gaactaaggayatttatttcc

SEQ ID NO: 34591 - DNA, 21 bp, Homo sapiens
atatcaaaacrcaataagtgt

SEQ ID NO: 34592 - DNA, 21 bp, Homo sapiens
ttcctccaacscagtacctag

SEQ ID NO: 34593 - DNA, 21 bp, Homo sapiens
tactaatagawaatagcaaac

SEQ ID NO: 34594 - DNA, 21 bp, Homo sapiens
aaggtgagtcrtgaaagcaga

SEQ ID NO: 34595 - DNA, 21 bp, Homo sapiens
ttgattttgcrgacaaatctc

SEQ ID NO: 34596 - DNA, 21 bp, Homo sapiens
gcagaaagatmttaaataata

SEQ ID NO: 34597 - DNA, 21 bp, Homo sapiens
tggtaagtaarctgcagaact

SEQ ID NO: 34598 - DNA, 21 bp, Homo sapiens
tagtctggggragctaaatta

SEQ ID NO: 34599 - DNA, 21 bp, Homo sapiens
ttaggtggggrgaaaacacat

SEQ ID NO: 34600 - DNA, 21 bp, Homo sapiens
gtaatagtgartcttttcaac

SEQ ID NO: 34601 - DNA, 21 bp, Homo sapiens
tatgttcagayatgtgttctt

SEQ ID NO: 34602 - DNA, 21 bp, Homo sapiens
gcatgcaatayaaagtggagt

SEQ ID NO: 34603 - DNA, 21 bp, Homo sapiens
gagagtcagaktgtggcaagg

SEQ ID NO: 34604 - DNA, 21 bp, Homo sapiens
gaatttcatcrtagccacagg

SEQ ID NO: 34605 - DNA, 21 bp, Homo sapiens
tcccgggcgawgtcttctagt

SEQ ID NO: 34606 - DNA, 21 bp, Homo sapiens
ataagtgtackcatctggaat

SEQ ID NO: 34607 - DNA, 21 bp, Homo sapiens
gttcctggaakgactttgatg

SEQ ID NO: 34608 - DNA, 21 bp, Homo sapiens
tcgttcttatrtgtcttaatg

SEQ ID NO: 34609 - DNA, 21 bp, Homo sapiens
atgattgacayggatttttgg

SEQ ID NO: 34610 - DNA, 21 bp, Homo sapiens
aagactcccartgattttaca

SEQ ID NO: 34611 - DNA, 21 bp, Homo sapiens
ggccccaaaasggtcatttta

SEQ ID NO: 34612 - DNA, 21 bp, Homo sapiens
ttgcaaagagyaattaaaaga

SEQ ID NO: 34613 - DNA, 21 bp, Homo sapiens
ttcagaagaaraattcaaagg

SEQ ID NO: 34614 - DNA, 21 bp, Homo sapiens
aggctcctgcytgctccatat

SEQ ID NO: 34615 - DNA, 21 bp, Homo sapiens
acaaacttttwctcctcaagt

SEQ ID NO: 34616 - DNA, 21 bp, Homo sapiens
tacaagaatgyctttaaagtg

SEQ ID NO: 34617 - DNA, 21 bp, Homo sapiens
aaaactttcayacttaagatg

SEQ ID NO: 34618 - DNA, 21 bp, Homo sapiens
aaattaattawcattggacaa

SEQ ID NO: 34619 - DNA, 21 bp, Homo sapiens
gttccttgatrtaataatttg

SEQ ID NO: 34620 - DNA, 21 bp, Homo sapiens
ttacactgtgkgaaatttcac

SEQ ID NO: 34621 - DNA, 21 bp, Homo sapiens
aaaaatttcgkgtcttaaaac

SEQ ID NO: 34622 - DNA, 21 bp, Homo sapiens
tggaatgcgartcaattgatt

SEQ ID NO: 34623 - DNA, 21 bp, Homo sapiens
gtaaaatgttraatgtgagaa

SEQ ID NO: 34624 - DNA, 21 bp, Homo sapiens
acccatacgayactttcaata

SEQ ID NO: 34625 - DNA, 21 bp, Homo sapiens
ttagcatgaawatcttttaat

SEQ ID NO: 34626 - DNA, 21 bp, Homo sapiens
ttcccagaagyctctgtcctt

SEQ ID NO: 34627 - DNA, 21 bp, Homo sapiens
tccttattccmagtttcttta

SEQ ID NO: 34628 - DNA, 21 bp, Homo sapiens
atacctcatayctacaatgga

SEQ ID NO: 34629 - DNA, 21 bp, Homo sapiens
ccccagcatgrtgtataataa

SEQ ID NO: 34630 - DNA, 21 bp, Homo sapiens
aattttgagcrgcacatacat

SEQ ID NO: 34631 - DNA, 21 bp, Homo sapiens
caaccaagtgkcaggcattgc

SEQ ID NO: 34632 - DNA, 21 bp, Homo sapiens
atggattttgrtatgataaaa

SEQ ID NO: 34633 - DNA, 21 bp, Homo sapiens
gccaaggaccrggacaatgga

SEQ ID NO: 34634 - DNA, 21 bp, Homo sapiens
agttccctaaygcagctgtag

SEQ ID NO: 34635 - DNA, 21 bp, Homo sapiens
tagatgagaaracaaaatgac

SEQ ID NO: 34636 - DNA, 21 bp, Homo sapiens
caagaaactgrtctattctgt

SEQ ID NO: 34637 - DNA, 21 bp, Homo sapiens
ctttataaackaagacactca

SEQ ID NO: 34638 - DNA, 21 bp, Homo sapiens
gagttgagagyaagggattga

SEQ ID NO: 34639 - DNA, 21 bp, Homo sapiens
ctgtccaattyatctctggca

SEQ ID NO: 34640 - DNA, 21 bp, Homo sapiens
atgtgtttgaratcaggtgcg

SEQ ID NO: 34641 - DNA, 21 bp, Homo sapiens
cttccattttktatcatctga

SEQ ID NO: 34642 - DNA, 21 bp, Homo sapiens
tccctcacctrttggctgaat

SEQ ID NO: 34643 - DNA, 21 bp, Homo sapiens
aggaaccgaakagcagatccc

SEQ ID NO: 34644 - DNA, 21 bp, Homo sapiens
aattaggaggktctgcctctt

SEQ ID NO: 34645 - DNA, 21 bp, Homo sapiens
aatccttggtytccttgtctt

SEQ ID NO: 34646 - DNA, 21 bp, Homo sapiens
cctaaataaaraggactgata

SEQ ID NO: 34647 - DNA, 21 bp, Homo sapiens
taatcaccggrtgaagaggaa

SEQ ID NO: 34648 - DNA, 21 bp, Homo sapiens
gtatcgcaagkcccttacatg

SEQ ID NO: 34649 - DNA, 21 bp, Homo sapiens
taaacccctartggtggctct

SEQ ID NO: 34650 - DNA, 21 bp, Homo sapiens
taaggtttacrgtgttcagag

SEQ ID NO: 34651 - DNA, 21 bp, Homo sapiens
tggcacagagrcgtaacctta

SEQ ID NO: 34652 - DNA, 21 bp, Homo sapiens
accatcctgasaggtaagcaa

SEQ ID NO: 34653 - DNA, 21 bp, Homo sapiens
tcaatcaaacrgtagtctgat

SEQ ID NO: 34654 - DNA, 21 bp, Homo sapiens
acatgatttayggaatacaga

SEQ ID NO: 34655 - DNA, 21 bp, Homo sapiens
ataggattcckgaaattcaaa

SEQ ID NO: 34656 - DNA, 21 bp, Homo sapiens
tcaactttgawttctaactgc

SEQ ID NO: 34657 - DNA, 21 bp, Homo sapiens
tatttcctacragcttcggat

SEQ ID NO: 34658 - DNA, 21 bp, Homo sapiens
aaagcttgaamgcatgttgtt

SEQ ID NO: 34659 - DNA, 21 bp, Homo sapiens
tttgactgtayatttgtcaga

SEQ ID NO: 34660 - DNA, 21 bp, Homo sapiens
ttctctctggraccagggctt

SEQ ID NO: 34661 - DNA, 21 bp, Homo sapiens
aacattttaayacagcactac

SEQ ID NO: 34662 - DNA, 21 bp, Homo sapiens
cattattaaaytatggtatgc

SEQ ID NO: 34663 - DNA, 21 bp, Homo sapiens
gaaccaacctycctcaatctc

SEQ ID NO: 34664 - DNA, 21 bp, Homo sapiens
cagaacccacrtataggaaaa

SEQ ID NO: 34665 - DNA, 21 bp, Homo sapiens
gcatccttttyctcctatgtc

SEQ ID NO: 34666 - DNA, 21 bp, Homo sapiens
tttaaggtaayctgttaaaat

SEQ ID NO: 34667 - DNA, 21 bp, Homo sapiens
aagaaacatayctcaaaataa

SEQ ID NO: 34668 - DNA, 21 bp, Homo sapiens
gctgagccctrtccaggaaag

SEQ ID NO: 34669 - DNA, 21 bp, Homo sapiens
gagaatgttawgcaggaaact

SEQ ID NO: 34670 - DNA, 21 bp, Homo sapiens
caacatagggyggaggcgtca

SEQ ID NO: 34671 - DNA, 21 bp, Homo sapiens
tttacttctawgtaaacaccc

SEQ ID NO: 34672 - DNA, 21 bp, Homo sapiens
agtgggggaarttattcttaa

SEQ ID NO: 34673 - DNA, 21 bp, Homo sapiens
tagctctagcytcagtacccg

SEQ ID NO: 34674 - DNA, 21 bp, Homo sapiens
tgtaaggacakaaatgattta

SEQ ID NO: 34675 - DNA, 21 bp, Homo sapiens
atggcaaacartatgagtcat

SEQ ID NO: 34676 - DNA, 21 bp, Homo sapiens
tgtgctctgasctcggtgtcc

SEQ ID NO: 34677 - DNA, 21 bp, Homo sapiens
gttctcccacrtctcccctat

SEQ ID NO: 34678 - DNA, 21 bp, Homo sapiens
gtcctttgttycttacatttt

SEQ ID NO: 34679 - DNA, 21 bp, Homo sapiens
gatacagcctygccccaactc

SEQ ID NO: 34680 - DNA, 21 bp, Homo sapiens
gtgctgagagsctctagggag

SEQ ID NO: 34681 - DNA, 21 bp, Homo sapiens
aaaacacaccraacccaattt

SEQ ID NO: 34682 - DNA, 21 bp, Homo sapiens
agtgcaggggraagccagttt

SEQ ID NO: 34683 - DNA, 21 bp, Homo sapiens
agatttcagcrcattaagtta

SEQ ID NO: 34684 - DNA, 21 bp, Homo sapiens
actttaacctrcagatgttcc

SEQ ID NO: 34685 - DNA, 21 bp, Homo sapiens
gtgccgtttayagtagctgcc

SEQ ID NO: 34686 - DNA, 21 bp, Homo sapiens
tgaatgaattygcattaaaaa

SEQ ID NO: 34687 - DNA, 21 bp, Homo sapiens
actctctttayacatgtttat

SEQ ID NO: 34688 - DNA, 21 bp, Homo sapiens
gagtgcaatgmttaaggagac

SEQ ID NO: 34689 - DNA, 21 bp, Homo sapiens
aatgcatgtgracactgacca

SEQ ID NO: 34690 - DNA, 21 bp, Homo sapiens
ttctattggasagcacctctt

SEQ ID NO: 34691 - DNA, 21 bp, Homo sapiens
ttaaaaccttmttgtgtcgat

SEQ ID NO: 34692 - DNA, 21 bp, Homo sapiens
aaaaacatgcwgaccgtaggg

SEQ ID NO: 34693 - DNA, 21 bp, Homo sapiens
taagaaatggrgtcagtaacc

SEQ ID NO: 34694 - DNA, 21 bp, Homo sapiens
tacaaactagytgtgtcaaca

SEQ ID NO: 34695 - DNA, 21 bp, Homo sapiens
gacttgttagscacaaatccc

SEQ ID NO: 34696 - DNA, 21 bp, Homo sapiens
gagaaatctgkcaaaaatatt

SEQ ID NO: 34697 - DNA, 21 bp, Homo sapiens
agacccacctygctcccaacc

SEQ ID NO: 34698 - DNA, 21 bp, Homo sapiens
taaatagatgwgcaaaaaaga

SEQ ID NO: 34699 - DNA, 21 bp, Homo sapiens
tcaaagcagarttactataaa

SEQ ID NO: 34700 - DNA, 21 bp, Homo sapiens
aaccttgatcsctttggctag

SEQ ID NO: 34701 - DNA, 21 bp, Homo sapiens
ctacgttgaamgagagtttta

SEQ ID NO: 34702 - DNA, 21 bp, Homo sapiens
attatttgcartggaaatgga

SEQ ID NO: 34703 - DNA, 21 bp, Homo sapiens
ttgagagaatrtattaagtaa

SEQ ID NO: 34704 - DNA, 21 bp, Homo sapiens
gggataaaatragagtaagct

SEQ ID NO: 34705 - DNA, 21 bp, Homo sapiens
ctcttagcctyggtatcttta

SEQ ID NO: 34706 - DNA, 21 bp, Homo sapiens
tagctcaactytcattgttta

SEQ ID NO: 34707 - DNA, 21 bp, Homo sapiens
gtgcttgtgcytgcatcaggg

SEQ ID NO: 34708 - DNA, 21 bp, Homo sapiens
tctctcaaggsgtctctcctc

SEQ ID NO: 34709 - DNA, 21 bp, Homo sapiens
tttaagtgtcygctttctctt

SEQ ID NO: 34710 - DNA, 21 bp, Homo sapiens
catcacagaastagtctagcc

SEQ ID NO: 34711 - DNA, 21 bp, Homo sapiens
gaattgtcttycctgtgttga

SEQ ID NO: 34712 - DNA, 21 bp, Homo sapiens
ttttatctcargtgccaactc

SEQ ID NO: 34713 - DNA, 21 bp, Homo sapiens
ctgttctgtgwtttatgttac

SEQ ID NO: 34714 - DNA, 21 bp, Homo sapiens
gaggcatttcycttttaccat

SEQ ID NO: 34715 - DNA, 21 bp, Homo sapiens
tttccccattwaatacgttga

SEQ ID NO: 34716 - DNA, 21 bp, Homo sapiens
tttgaacaaakaacttgatag

SEQ ID NO: 34717 - DNA, 21 bp, Homo sapiens
caccttacaakgagatgggac

SEQ ID NO: 34718 - DNA, 21 bp, Homo sapiens
ataaagttcakttttgtacac

SEQ ID NO: 34719 - DNA, 21 bp, Homo sapiens
tgatcctagcytaatgtgcta

SEQ ID NO: 34720 - DNA, 21 bp, Homo sapiens
ttcaaatagtwtatcctctag

SEQ ID NO: 34721 - DNA, 21 bp, Homo sapiens
aggagcttcayaccgggaact

SEQ ID NO: 34722 - DNA, 21 bp, Homo sapiens
tttctacatawgagatcactg

SEQ ID NO: 34723 - DNA, 21 bp, Homo sapiens
tactttttgtrataaataata

SEQ ID NO: 34724 - DNA, 21 bp, Homo sapiens
aaaaatgtatyaatcactcct

SEQ ID NO: 34725 - DNA, 21 bp, Homo sapiens
gtggttctggkgtctggagca

SEQ ID NO: 34726 - DNA, 21 bp, Homo sapiens
ccttgaaataraaaagtaaat

SEQ ID NO: 34727 - DNA, 21 bp, Homo sapiens
aacaaaatcargtaattatac

SEQ ID NO: 34728 - DNA, 21 bp, Homo sapiens
aacccattgtktactcacttt

SEQ ID NO: 34729 - DNA, 21 bp, Homo sapiens
ccattatcatmatcactaata

SEQ ID NO: 34730 - DNA, 21 bp, Homo sapiens
ttgactatggygaaataaaaa

SEQ ID NO: 34731 - DNA, 21 bp, Homo sapiens
aacatatagayttacctagaa

SEQ ID NO: 34732 - DNA, 21 bp, Homo sapiens
gtcctaagatrttttgtcatc

SEQ ID NO: 34733 - DNA, 21 bp, Homo sapiens
atttgactaawgaagtaaagc

SEQ ID NO: 34734 - DNA, 21 bp, Homo sapiens
cacagtctggragaatatatt

SEQ ID NO: 34735 - DNA, 21 bp, Homo sapiens
tcagaatgtcycctatgtgaa

SEQ ID NO: 34736 - DNA, 21 bp, Homo sapiens
ttcctttagtkttgaagagtt

SEQ ID NO: 34737 - DNA, 21 bp, Homo sapiens
tttgtattcawgccagttaat

SEQ ID NO: 34738 - DNA, 21 bp, Homo sapiens
agcagagaaasaatgaagatg

SEQ ID NO: 34739 - DNA, 21 bp, Homo sapiens
tatgagctggyagagagtata

SEQ ID NO: 34740 - DNA, 21 bp, Homo sapiens
gatgtaaaggycatttagtgc

SEQ ID NO: 34741 - DNA, 21 bp, Homo sapiens
tatgcttggtrtactagacac

SEQ ID NO: 34742 - DNA, 21 bp, Homo sapiens
cctcactccaygttaaataca

SEQ ID NO: 34743 - DNA, 21 bp, Homo sapiens
ttttttataawcatcagtgct

SEQ ID NO: 34744 - DNA, 21 bp, Homo sapiens
tgctgaataarccagtcataa

SEQ ID NO: 34745 - DNA, 21 bp, Homo sapiens
aaggagtacartgggagtaat

SEQ ID NO: 34746 - DNA, 21 bp, Homo sapiens
aggctaggggsatggggcagt

SEQ ID NO: 34747 - DNA, 21 bp, Homo sapiens
aagtttattgrcctagtagac

SEQ ID NO: 34748 - DNA, 21 bp, Homo sapiens
gagagagtcckcatcataaag

SEQ ID NO: 34749 - DNA, 21 bp, Homo sapiens
acctgaggtcktttctctaag

SEQ ID NO: 34750 - DNA, 21 bp, Homo sapiens
aaatggtacaygctggatgtc

SEQ ID NO: 34751 - DNA, 21 bp, Homo sapiens
agcccccaaamtttatactca

SEQ ID NO: 34752 - DNA, 21 bp, Homo sapiens
tttttaaaagraatcacttgg

SEQ ID NO: 34753 - DNA, 21 bp, Homo sapiens
tttccctataytataacacag

SEQ ID NO: 34754 - DNA, 21 bp, Homo sapiens
cagttctagtycttcggtcac

SEQ ID NO: 34755 - DNA, 21 bp, Homo sapiens
aacaagtgagsaaatgtgttt

SEQ ID NO: 34756 - DNA, 21 bp, Homo sapiens
ttccattttarggatatggat

SEQ ID NO: 34757 - DNA, 21 bp, Homo sapiens
ctgattgcggrgtggttgtca

SEQ ID NO: 34758 - DNA, 21 bp, Homo sapiens
tttctgtagtrtatcttcttg

SEQ ID NO: 34759 - DNA, 21 bp, Homo sapiens
tttgatgatgrttacccctgc

SEQ ID NO: 34760 - DNA, 21 bp, Homo sapiens
atgtgatcagktatttgtcag

SEQ ID NO: 34761 - DNA, 21 bp, Homo sapiens
taatcccttcmtttggtcaac

SEQ ID NO: 34762 - DNA, 21 bp, Homo sapiens
ctcccaggccrctagcaaagc

SEQ ID NO: 34763 - DNA, 21 bp, Homo sapiens
tccggcgataygcttgtcgct

SEQ ID NO: 34764 - DNA, 21 bp, Homo sapiens
ctgaagaaaartactcttata

SEQ ID NO: 34765 - DNA, 21 bp, Homo sapiens
caagtactacyatattttgtg

SEQ ID NO: 34766 - DNA, 21 bp, Homo sapiens
ttgaggtacakttgaaagagt

SEQ ID NO: 34767 - DNA, 21 bp, Homo sapiens
tttcccacctrtatatgtatg

SEQ ID NO: 34768 - DNA, 21 bp, Homo sapiens
gggaaatgtgrgaatcaacag

SEQ ID NO: 34769 - DNA, 21 bp, Homo sapiens
atcactctccygaattaagtt

SEQ ID NO: 34770 - DNA, 21 bp, Homo sapiens
agaacaaggargggagacagg

SEQ ID NO: 34771 - DNA, 21 bp, Homo sapiens
cctgatcccartagaaacatg

SEQ ID NO: 34772 - DNA, 21 bp, Homo sapiens
aatgtcagttyggaaagattg

SEQ ID NO: 34773 - DNA, 21 bp, Homo sapiens
gttactaagaraggatgtagg

SEQ ID NO: 34774 - DNA, 21 bp, Homo sapiens
tgatgttcatycctttatttg

SEQ ID NO: 34775 - DNA, 21 bp, Homo sapiens
gacaatgtccrcagtgattaa

SEQ ID NO: 34776 - DNA, 21 bp, Homo sapiens
ataaaatatayagataataag

SEQ ID NO: 34777 - DNA, 21 bp, Homo sapiens
ttttaaatgargaagggaata

SEQ ID NO: 34778 - DNA, 21 bp, Homo sapiens
ctaatgggagytcataattta

SEQ ID NO: 34779 - DNA, 21 bp, Homo sapiens
agcctcttccyttgagttcgc

SEQ ID NO: 34780 - DNA, 21 bp, Homo sapiens
atatttcttasaactgtggac

SEQ ID NO: 34781 - DNA, 21 bp, Homo sapiens
aagtctattaygatctcagcc

SEQ ID NO: 34782 - DNA, 21 bp, Homo sapiens
ctaagaaaaarcaatggaaca

SEQ ID NO: 34783 - DNA, 21 bp, Homo sapiens
actttcagcakctagctgtga

SEQ ID NO: 34784 - DNA, 21 bp, Homo sapiens
aaaactcatgytcgtgaactc

SEQ ID NO: 34785 - DNA, 21 bp, Homo sapiens
tcactctaccyctgctctcaa

SEQ ID NO: 34786 - DNA, 21 bp, Homo sapiens
tctcttccagraacatgctca

SEQ ID NO: 34787 - DNA, 21 bp, Homo sapiens
aagaacctaaraagaatccag

SEQ ID NO: 34788 - DNA, 21 bp, Homo sapiens
gagacaacacrgaagaggctg

SEQ ID NO: 34789 - DNA, 21 bp, Homo sapiens
ctgtccctctytgcagggccc

SEQ ID NO: 34790 - DNA, 21 bp, Homo sapiens
gtccagaaagygcccagccag

SEQ ID NO: 34791 - DNA, 21 bp, Homo sapiens
ggatgatggarcagacatggg

SEQ ID NO: 34792 - DNA, 21 bp, Homo sapiens
tggatcacacrgcccacagag

SEQ ID NO: 34793 - DNA, 21 bp, Homo sapiens
ccctacccttrtaatgttatt

SEQ ID NO: 34794 - DNA, 21 bp, Homo sapiens
catacagacascattctaagg

SEQ ID NO: 34795 - DNA, 21 bp, Homo sapiens
tccacatctcycccgatccgc

SEQ ID NO: 34796 - DNA, 21 bp, Homo sapiens
atgtatttagrtaggtgtcag

SEQ ID NO: 34797 - DNA, 21 bp, Homo sapiens
cacagcgagartcaaggctgc

SEQ ID NO: 34798 - DNA, 21 bp, Homo sapiens
tccactttacyggaaaatgtt

SEQ ID NO: 34799 - DNA, 21 bp, Homo sapiens
ttccacttctsggtttatatc

SEQ ID NO: 34800 - DNA, 21 bp, Homo sapiens
ctgaaaccccrtagtcctcac

SEQ ID NO: 34801 - DNA, 21 bp, Homo sapiens
tggggtctgasactgcctcca

SEQ ID NO: 34802 - DNA, 21 bp, Homo sapiens
ttaacactccrccccaacatg

SEQ ID NO: 34803 - DNA, 21 bp, Homo sapiens
tgctctgaaaytggaactttc

SEQ ID NO: 34804 - DNA, 21 bp, Homo sapiens
taagtaaaaaytgacagagct

SEQ ID NO: 34805 - DNA, 21 bp, Homo sapiens
gaaaggaaagygatcactgag

SEQ ID NO: 34806 - DNA, 21 bp, Homo sapiens
gaaccgggtcrgcgttgagga

SEQ ID NO: 34807 - DNA, 21 bp, Homo sapiens
gcacgccgagmgagatcttcc

SEQ ID NO: 34808 - DNA, 21 bp, Homo sapiens
ggacagggaawcaaactgacg

SEQ ID NO: 34809 - DNA, 21 bp, Homo sapiens
tgccaaatttyctcattttga

SEQ ID NO: 34810 - DNA, 21 bp, Homo sapiens
tttcatacaaracccaaacca

SEQ ID NO: 34811 - DNA, 21 bp, Homo sapiens
ttgcatgcagkttaaaatcag

SEQ ID NO: 34812 - DNA, 21 bp, Homo sapiens
ataggaaacaygcctggggtc

SEQ ID NO: 34813 - DNA, 21 bp, Homo sapiens
gggggataagsgggtgaaaat

SEQ ID NO: 34814 - DNA, 21 bp, Homo sapiens
gtttattgctstccatctgta

SEQ ID NO: 34815 - DNA, 21 bp, Homo sapiens
tacagggcccrtgaccatcgc

SEQ ID NO: 34816 - DNA, 21 bp, Homo sapiens
tgaacaactaygacaaaaagt

SEQ ID NO: 34817 - DNA, 21 bp, Homo sapiens
tgctaggcatygttccagggg

SEQ ID NO: 34818 - DNA, 21 bp, Homo sapiens
gaacagtatcyggccacaacg

SEQ ID NO: 34819 - DNA, 21 bp, Homo sapiens
accctgcatayacacagtggg

SEQ ID NO: 34820 - DNA, 21 bp, Homo sapiens
ggatggacatrctcattcatt

SEQ ID NO: 34821 - DNA, 21 bp, Homo sapiens
agaaaggagamgttgggggtg

SEQ ID NO: 34822 - DNA, 21 bp, Homo sapiens
atgcctccagmtcctgggccc

SEQ ID NO: 34823 - DNA, 21 bp, Homo sapiens
ggggagagccrttgtgaacag

SEQ ID NO: 34824 - DNA, 21 bp, Homo sapiens
ataacagcacrcccagtcttt

SEQ ID NO: 34825 - DNA, 21 bp, Homo sapiens
caatccgtgaygtgaaacatt

SEQ ID NO: 34826 - DNA, 21 bp, Homo sapiens
ggttgacttcyagtagatggc

SEQ ID NO: 34827 - DNA, 21 bp, Homo sapiens
tgtctgatctrcctttcttga

SEQ ID NO: 34828 - DNA, 21 bp, Homo sapiens
taattgactayagagacatgg

SEQ ID NO: 34829 - DNA, 21 bp, Homo sapiens
tcccaggagtsagaaaaagac

SEQ ID NO: 34830 - DNA, 21 bp, Homo sapiens
taaaatcaagkgggcaaggtt

SEQ ID NO: 34831 - DNA, 21 bp, Homo sapiens
ggaggccttaytgaggggaag

SEQ ID NO: 34832 - DNA, 21 bp, Homo sapiens
ggaaacagggwctctcagcaa

SEQ ID NO: 34833 - DNA, 21 bp, Homo sapiens
tcttttaagayttcactattc

SEQ ID NO: 34834 - DNA, 21 bp, Homo sapiens
tatagagcctygaaatcataa

SEQ ID NO: 34835 - DNA, 21 bp, Homo sapiens
gagaagaagayggaaatgctc

SEQ ID NO: 34836 - DNA, 21 bp, Homo sapiens
tccattttccsatctgtagag

SEQ ID NO: 34837 - DNA, 21 bp, Homo sapiens
agagtgggcayttctgtttga

SEQ ID NO: 34838 - DNA, 21 bp, Homo sapiens
ttgaaacggayttgaattccc

SEQ ID NO: 34839 - DNA, 21 bp, Homo sapiens
gtgatgtcttwtctccctaga

SEQ ID NO: 34840 - DNA, 21 bp, Homo sapiens
tccactgttarctgctaaata

SEQ ID NO: 34841 - DNA, 21 bp, Homo sapiens
gcctcccaacmtttcttggca

SEQ ID NO: 34842 - DNA, 21 bp, Homo sapiens
ccatctcccawggtaaaggca

SEQ ID NO: 34843 - DNA, 21 bp, Homo sapiens
agtctctcctratcctccagg

SEQ ID NO: 34844 - DNA, 21 bp, Homo sapiens
tatacaaatcrccacactgag

SEQ ID NO: 34845 - DNA, 21 bp, Homo sapiens
gagggaggggraaccgagagt

SEQ ID NO: 34846 - DNA, 21 bp, Homo sapiens
agcattccacytggtattcct

SEQ ID NO: 34847 - DNA, 21 bp, Homo sapiens
tatccaagggraatactagaa

SEQ ID NO: 34848 - DNA, 21 bp, Homo sapiens
gagatggcacyacagcaatgt

SEQ ID NO: 34849 - DNA, 21 bp, Homo sapiens
acttgcgttcwgagtaagagg

SEQ ID NO: 34850 - DNA, 21 bp, Homo sapiens
tgaggtccagwaccctgcatg

SEQ ID NO: 34851 - DNA, 21 bp, Homo sapiens
gtgagtgtggygcctgccagc

SEQ ID NO: 34852 - DNA, 21 bp, Homo sapiens
aacgagtaaartggtaaggtg

SEQ ID NO: 34853 - DNA, 21 bp, Homo sapiens
gcagtgaaagmcatcatgata

SEQ ID NO: 34854 - DNA, 21 bp, Homo sapiens
aaagaggcttrctacatgcta

SEQ ID NO: 34855 - DNA, 21 bp, Homo sapiens
gaatttccctwgtatcagtat

SEQ ID NO: 34856 - DNA, 21 bp, Homo sapiens
tcatccaatcratagataatt

SEQ ID NO: 34857 - DNA, 21 bp, Homo sapiens
ttaaaagtagygcaagtatag

SEQ ID NO: 34858 - DNA, 21 bp, Homo sapiens
agagaaaaaarcaacattgag

SEQ ID NO: 34859 - DNA, 21 bp, Homo sapiens
aatctcctgcyttccacaaaa

SEQ ID NO: 34860 - DNA, 21 bp, Homo sapiens
tattaatgtgrcttaaacatt

SEQ ID NO: 34861 - DNA, 21 bp, Homo sapiens
tcagtttgttygcagttgcgt

SEQ ID NO: 34862 - DNA, 21 bp, Homo sapiens
ccaagaaatayagtatgatat

SEQ ID NO: 34863 - DNA, 21 bp, Homo sapiens
ttgttttcatwttcctttgtc

SEQ ID NO: 34864 - DNA, 21 bp, Homo sapiens
cttagttcccyggagctggtg

SEQ ID NO: 34865 - DNA, 21 bp, Homo sapiens
ccctttatttrctagatagag

SEQ ID NO: 34866 - DNA, 21 bp, Homo sapiens
atcaggtatakttgtgtctta

SEQ ID NO: 34867 - DNA, 21 bp, Homo sapiens
ggtagttattmttatatcaga

SEQ ID NO: 34868 - DNA, 21 bp, Homo sapiens
gcataagccaragaagtagtg

SEQ ID NO: 34869 - DNA, 21 bp, Homo sapiens
aggacctttayagtatcaaca

SEQ ID NO: 34870 - DNA, 21 bp, Homo sapiens
tagactttttwaaaaaatttt

SEQ ID NO: 34871 - DNA, 21 bp, Homo sapiens
gtactgttatycccagaagat

SEQ ID NO: 34872 - DNA, 21 bp, Homo sapiens
acagctttcaytgcttcttcg

SEQ ID NO: 34873 - DNA, 21 bp, Homo sapiens
ctattgcatgygcagagtggt

SEQ ID NO: 34874 - DNA, 21 bp, Homo sapiens
ttttagaatcyaatcttttcc

SEQ ID NO: 34875 - DNA, 21 bp, Homo sapiens
ttatgtgtgcraactaaacta

SEQ ID NO: 34876 - DNA, 21 bp, Homo sapiens
cgacatttaaracgaatgtcg

SEQ ID NO: 34877 - DNA, 21 bp, Homo sapiens
tgaatgtatayatgtactttc

SEQ ID NO: 34878 - DNA, 21 bp, Homo sapiens
atcccatcccrcagcaggcag

SEQ ID NO: 34879 - DNA, 21 bp, Homo sapiens
caaataacttyaaaatgtatt

SEQ ID NO: 34880 - DNA, 21 bp, Homo sapiens
agtggaataasatctcacact

SEQ ID NO: 34881 - DNA, 21 bp, Homo sapiens
acatactgaasaccacctggt

SEQ ID NO: 34882 - DNA, 21 bp, Homo sapiens
tgaatgacaarccaaccagaa

SEQ ID NO: 34883 - DNA, 21 bp, Homo sapiens
tcttcagtcamtcttcctgcc

SEQ ID NO: 34884 - DNA, 21 bp, Homo sapiens
ggcagctctayatgtaatcac

SEQ ID NO: 34885 - DNA, 21 bp, Homo sapiens
agttcatggtrgtaatttagt

SEQ ID NO: 34886 - DNA, 21 bp, Homo sapiens
cctctattttrcatcatgtca

SEQ ID NO: 34887 - DNA, 21 bp, Homo sapiens
taaaggaaacwgtgtaaccta

SEQ ID NO: 34888 - DNA, 21 bp, Homo sapiens
agtgaagttayatccaggtct

SEQ ID NO: 34889 - DNA, 21 bp, Homo sapiens
agatagctcamgatactattt

SEQ ID NO: 34890 - DNA, 21 bp, Homo sapiens
aaccttaaaamgaacatcaga

SEQ ID NO: 34891 - DNA, 21 bp, Homo sapiens
attgtatgatkctctggactt

SEQ ID NO: 34892 - DNA, 21 bp, Homo sapiens
ctttgtggggraaagacacag

SEQ ID NO: 34893 - DNA, 21 bp, Homo sapiens
agagagaaacrgcaaatcaca

SEQ ID NO: 34894 - DNA, 21 bp, Homo sapiens
agcttaccttrcaccaagtaa

SEQ ID NO: 34895 - DNA, 21 bp, Homo sapiens
gaccctaataygacaactttt

SEQ ID NO: 34896 - DNA, 21 bp, Homo sapiens
tcctatagcaygaccataagt

SEQ ID NO: 34897 - DNA, 21 bp, Homo sapiens
cagaagccaakaaatgacaga

SEQ ID NO: 34898 - DNA, 21 bp, Homo sapiens
ccacccatgayatctgtattt

SEQ ID NO: 34899 - DNA, 21 bp, Homo sapiens
tcactgatacrtgtttcatta

SEQ ID NO: 34900 - DNA, 21 bp, Homo sapiens
cagtcagtccrtggaccttgg

SEQ ID NO: 34901 - DNA, 21 bp, Homo sapiens
aaaaagttaaygtattttggg

SEQ ID NO: 34902 - DNA, 21 bp, Homo sapiens
aggcctaaagrttgtgtggac

SEQ ID NO: 34903 - DNA, 21 bp, Homo sapiens
caccactgccycctggtttct

SEQ ID NO: 34904 - DNA, 21 bp, Homo sapiens
aggctcagcakagttttcaat

SEQ ID NO: 34905 - DNA, 21 bp, Homo sapiens
aatttgcactyaccattaaga

SEQ ID NO: 34906 - DNA, 21 bp, Homo sapiens
gctactggaaycccatttgca

SEQ ID NO: 34907 - DNA, 21 bp, Homo sapiens
aagaggatccygggaggtctc

SEQ ID NO: 34908 - DNA, 21 bp, Homo sapiens
cccgcagttgsgcgcggggtg

SEQ ID NO: 34909 - DNA, 21 bp, Homo sapiens
agttggcaaartcatataaac

SEQ ID NO: 34910 - DNA, 21 bp, Homo sapiens
gcagctgaaayacaagagcaa

SEQ ID NO: 34911 - DNA, 21 bp, Homo sapiens
agagtcatttrtttcctatgg

SEQ ID NO: 34912 - DNA, 21 bp, Homo sapiens
tggaccaaatrcctggctctt

SEQ ID NO: 34913 - DNA, 21 bp, Homo sapiens
atcctcccccmaactgatatt

SEQ ID NO: 34914 - DNA, 21 bp, Homo sapiens
atgggttattytcggtttagc

SEQ ID NO: 34915 - DNA, 21 bp, Homo sapiens
ttagtaaggaraaagttacac

SEQ ID NO: 34916 - DNA, 21 bp, Homo sapiens
atgctttcccktacttctggc

SEQ ID NO: 34917 - DNA, 21 bp, Homo sapiens
cagaaccaccrtgagagtgag

SEQ ID NO: 34918 - DNA, 21 bp, Homo sapiens
aaacacaggcrctgcttgcac

SEQ ID NO: 34919 - DNA, 21 bp, Homo sapiens
gattctcttcragcccctgca

SEQ ID NO: 34920 - DNA, 21 bp, Homo sapiens
tgtacaatcawtgtggttcat

SEQ ID NO: 34921 - DNA, 21 bp, Homo sapiens
tgagcaggctyagcatctgga

SEQ ID NO: 34922 - DNA, 21 bp, Homo sapiens
atattaacackctgatcaaga

SEQ ID NO: 34923 - DNA, 21 bp, Homo sapiens
ttttggatgamaaaacttgtt

SEQ ID NO: 34924 - DNA, 21 bp, Homo sapiens
atgagtgacartctggagtcc

SEQ ID NO: 34925 - DNA, 21 bp, Homo sapiens
caactttgtarctgtaatagg

SEQ ID NO: 34926 - DNA, 21 bp, Homo sapiens
ttgtgattacrttaagtattt

SEQ ID NO: 34927 - DNA, 21 bp, Homo sapiens
ccctcttctcmctggttaaac

SEQ ID NO: 34928 - DNA, 21 bp, Homo sapiens
agctggcctgygtgtaaggga

SEQ ID NO: 34929 - DNA, 21 bp, Homo sapiens
ctttgcatcargctatagccc

SEQ ID NO: 34930 - DNA, 21 bp, Homo sapiens
cttagtctccyttatgaacaa

SEQ ID NO: 34931 - DNA, 21 bp, Homo sapiens
catcagtaacrtgccggttac

SEQ ID NO: 34932 - DNA, 21 bp, Homo sapiens
tacagtttacyttgccacaaa

SEQ ID NO: 34933 - DNA, 21 bp, Homo sapiens
caagtcaaaartagatatgta

SEQ ID NO: 34934 - DNA, 21 bp, Homo sapiens
agcagtagccrgagagcagat

SEQ ID NO: 34935 - DNA, 21 bp, Homo sapiens
tttgtagagcyagggctgcta

SEQ ID NO: 34936 - DNA, 21 bp, Homo sapiens
caatgtgaaaygtggcattgt

SEQ ID NO: 34937 - DNA, 21 bp, Homo sapiens
tttcacttatygtaatacact

SEQ ID NO: 34938 - DNA, 21 bp, Homo sapiens
caaggcatgtrtcattatttt

SEQ ID NO: 34939 - DNA, 21 bp, Homo sapiens
caaacttaagyccaaatccaa

SEQ ID NO: 34940 - DNA, 21 bp, Homo sapiens
gtgctctctcytgagctttta

SEQ ID NO: 34941 - DNA, 21 bp, Homo sapiens
tttcatatagwaactttgaca

SEQ ID NO: 34942 - DNA, 21 bp, Homo sapiens
tcgcccttcartagcatccca

SEQ ID NO: 34943 - DNA, 21 bp, Homo sapiens
tatctcagctrtgctaggaga

SEQ ID NO: 34944 - DNA, 21 bp, Homo sapiens
cccccagcttrcagatgacaa

SEQ ID NO: 34945 - DNA, 21 bp, Homo sapiens
tttctcatcartcagaggaag

SEQ ID NO: 34946 - DNA, 21 bp, Homo sapiens
ttaaaaatatsattttggcca

SEQ ID NO: 34947 - DNA, 21 bp, Homo sapiens
agttggcattmgtcacacagt

SEQ ID NO: 34948 - DNA, 21 bp, Homo sapiens
atgtgatgctkgtggagggag

SEQ ID NO: 34949 - DNA, 21 bp, Homo sapiens
tcagagcttgyaaatggagtt

SEQ ID NO: 34950 - DNA, 21 bp, Homo sapiens
taccccacctsaggacctgca

SEQ ID NO: 34951 - DNA, 21 bp, Homo sapiens
ttctagcaaascgatgccttt

SEQ ID NO: 34952 - DNA, 21 bp, Homo sapiens
gtcaaaatcayatgacacagg

SEQ ID NO: 34953 - DNA, 21 bp, Homo sapiens
actggcagccstgctcattac

SEQ ID NO: 34954 - DNA, 21 bp, Homo sapiens
acttttcagawtatcactctg

SEQ ID NO: 34955 - DNA, 21 bp, Homo sapiens
aaatttgttcrccacagcaac

SEQ ID NO: 34956 - DNA, 21 bp, Homo sapiens
tgtgcaaggcwttagatggtg

SEQ ID NO: 34957 - DNA, 21 bp, Homo sapiens
caccccacagkttacaggtca

SEQ ID NO: 34958 - DNA, 21 bp, Homo sapiens
tcattgccttrtttaaaactg

SEQ ID NO: 34959 - DNA, 21 bp, Homo sapiens
ttcagaagaaycaggcagtgc

SEQ ID NO: 34960 - DNA, 21 bp, Homo sapiens
actagcagtargatcaacaca

SEQ ID NO: 34961 - DNA, 21 bp, Homo sapiens
ccccaaacctracaattgaac

SEQ ID NO: 34962 - DNA, 21 bp, Homo sapiens
aatcttgactyttaaatggtg

SEQ ID NO: 34963 - DNA, 21 bp, Homo sapiens
ccaatatcacygtatacattt

SEQ ID NO: 34964 - DNA, 21 bp, Homo sapiens
gatttccttasttgtaagaca

SEQ ID NO: 34965 - DNA, 21 bp, Homo sapiens
acccagtggayaaaatatgga

SEQ ID NO: 34966 - DNA, 21 bp, Homo sapiens
atttaattatytgtgtgataa

SEQ ID NO: 34967 - DNA, 21 bp, Homo sapiens
ctcattcccayctcaacctct

SEQ ID NO: 34968 - DNA, 21 bp, Homo sapiens
caagtagaaartcataacttg

SEQ ID NO: 34969 - DNA, 21 bp, Homo sapiens
cggcatagaayatttaacagc

SEQ ID NO: 34970 - DNA, 21 bp, Homo sapiens
gcattcacatrcagtcagtgc

SEQ ID NO: 34971 - DNA, 21 bp, Homo sapiens
actcctcgagkgctcctggaa

SEQ ID NO: 34972 - DNA, 21 bp, Homo sapiens
caagcatatcraaatttgaga

SEQ ID NO: 34973 - DNA, 21 bp, Homo sapiens
tggccagtacyaagaaaagca

SEQ ID NO: 34974 - DNA, 21 bp, Homo sapiens
actgcactgcrtcaagcactt

SEQ ID NO: 34975 - DNA, 21 bp, Homo sapiens
acacagcaggsaccatccagg

SEQ ID NO: 34976 - DNA, 21 bp, Homo sapiens
gcctgggaccyatgtacaata

SEQ ID NO: 34977 - DNA, 21 bp, Homo sapiens
ggaagaaagcytgacagctag

SEQ ID NO: 34978 - DNA, 21 bp, Homo sapiens
gagcaggaaayaatacaagat

SEQ ID NO: 34979 - DNA, 21 bp, Homo sapiens
tgctcatggcrgaaggggaag

SEQ ID NO: 34980 - DNA, 21 bp, Homo sapiens
tgaatttctcyacattcttgt

SEQ ID NO: 34981 - DNA, 21 bp, Homo sapiens
gccacaactgrtaacattcac

SEQ ID NO: 34982 - DNA, 21 bp, Homo sapiens
tggaaactcayaatggtgcag

SEQ ID NO: 34983 - DNA, 21 bp, Homo sapiens
gtgttttagamatagagctca

SEQ ID NO: 34984 - DNA, 21 bp, Homo sapiens
tttaatcacamggaacaatca

SEQ ID NO: 34985 - DNA, 21 bp, Homo sapiens
catggaagagkttagatctaa

SEQ ID NO: 34986 - DNA, 21 bp, Homo sapiens
ctattgactayagaaagtgct

SEQ ID NO: 34987 - DNA, 21 bp, Homo sapiens
ttccacttctsccttagatat

SEQ ID NO: 34988 - DNA, 21 bp, Homo sapiens
cactgctaaayattccaactg

SEQ ID NO: 34989 - DNA, 21 bp, Homo sapiens
cagtaataacrttgtctttga

SEQ ID NO: 34990 - DNA, 21 bp, Homo sapiens
tggaattttaraaaatgttct

SEQ ID NO: 34991 - DNA, 21 bp, Homo sapiens
aatgcctggtwctgggaagat

SEQ ID NO: 34992 - DNA, 21 bp, Homo sapiens
ggtgatggccrtctttctgat

SEQ ID NO: 34993 - DNA, 21 bp, Homo sapiens
tcatcagtcawacacaccatc

SEQ ID NO: 34994 - DNA, 21 bp, Homo sapiens
agctgagcatrtatgtggaaa

SEQ ID NO: 34995 - DNA, 21 bp, Homo sapiens
cactcctggtyacctgctctg

SEQ ID NO: 34996 - DNA, 21 bp, Homo sapiens
tgatttattawagaatagcat

SEQ ID NO: 34997 - DNA, 21 bp, Homo sapiens
gagatttgaaytgtctatttt

SEQ ID NO: 34998 - DNA, 21 bp, Homo sapiens
gtgagagtgaygaaatagaat

SEQ ID NO: 34999 - DNA, 21 bp, Homo sapiens
tgtctgctgtrcccctctagg

SEQ ID NO: 35000 - DNA, 21 bp, Homo sapiens
tttgatggtgyggtcagtact

SEQ ID NO: 35001 - DNA, 21 bp, Homo sapiens
ttgagaagaaygtgaatcctg

SEQ ID NO: 35002 - DNA, 21 bp, Homo sapiens
tcctaaaactyaaattctgca

SEQ ID NO: 35003 - DNA, 21 bp, Homo sapiens
taaggaaagaygtaggtcaaa

SEQ ID NO: 35004 - DNA, 21 bp, Homo sapiens
atattggtctrtaagtactag

SEQ ID NO: 35005 - DNA, 21 bp, Homo sapiens
catatacttayaggtgaagcc

SEQ ID NO: 35006 - DNA, 21 bp, Homo sapiens
ataatgttccwccccttttag

SEQ ID NO: 35007 - DNA, 21 bp, Homo sapiens
acttgtgaccyaccaacctgc

SEQ ID NO: 35008 - DNA, 21 bp, Homo sapiens
aaataaattakacaaaatatt

SEQ ID NO: 35009 - DNA, 21 bp, Homo sapiens
atgcgcatacytaaaagtgag

SEQ ID NO: 35010 - DNA, 21 bp, Homo sapiens
tgaaggaatamaggcaaagac

SEQ ID NO: 35011 - DNA, 21 bp, Homo sapiens
tctggttcccrtggggcttcc

SEQ ID NO: 35012 - DNA, 21 bp, Homo sapiens
attctaaaagraaatggaaaa

SEQ ID NO: 35013 - DNA, 21 bp, Homo sapiens
gttcctccgcyaggggactac

SEQ ID NO: 35014 - DNA, 21 bp, Homo sapiens
catctagaacygctttggtgt

SEQ ID NO: 35015 - DNA, 21 bp, Homo sapiens
ccatatgcctytgtaaaagta

SEQ ID NO: 35016 - DNA, 21 bp, Homo sapiens
tgtgattgttmattttatgtc

SEQ ID NO: 35017 - DNA, 21 bp, Homo sapiens
gtcatgatcasgacttcctgt

SEQ ID NO: 35018 - DNA, 21 bp, Homo sapiens
aaagatgagaytgaaacaagc

SEQ ID NO: 35019 - DNA, 21 bp, Homo sapiens
agggcaccatygttcaactta

SEQ ID NO: 35020 - DNA, 21 bp, Homo sapiens
gtagcagttcraatcacctct

SEQ ID NO: 35021 - DNA, 21 bp, Homo sapiens
aaatttccttycccatccata

SEQ ID NO: 35022 - DNA, 21 bp, Homo sapiens
agagttgggartagcccttcc

SEQ ID NO: 35023 - DNA, 21 bp, Homo sapiens
ggtcataaatrtggggcccta

SEQ ID NO: 35024 - DNA, 21 bp, Homo sapiens
attaaatgttycaagatcaag

SEQ ID NO: 35025 - DNA, 21 bp, Homo sapiens
acgtgttaggwgacttaccca

SEQ ID NO: 35026 - DNA, 21 bp, Homo sapiens
cgtgtttgagrccatgtcttc

SEQ ID NO: 35027 - DNA, 21 bp, Homo sapiens
ttttggcctcyccaacaggga

SEQ ID NO: 35028 - DNA, 21 bp, Homo sapiens
tatagagactyatctttaaga

SEQ ID NO: 35029 - DNA, 21 bp, Homo sapiens
caagagagaawactacctaga

SEQ ID NO: 35030 - DNA, 21 bp, Homo sapiens
ctttatcacaygccttggtgt

SEQ ID NO: 35031 - DNA, 21 bp, Homo sapiens
cttgccatatrtcaggcacta

SEQ ID NO: 35032 - DNA, 21 bp, Homo sapiens
attccgacttmcactcaaatt

SEQ ID NO: 35033 - DNA, 21 bp, Homo sapiens
atccttgggcyagtcacaggc

SEQ ID NO: 35034 - DNA, 21 bp, Homo sapiens
ggaatattacygtcttaacca

SEQ ID NO: 35035 - DNA, 21 bp, Homo sapiens
ttcagatttckttggatggga

SEQ ID NO: 35036 - DNA, 21 bp, Homo sapiens
aatctgcttcytggtctgaag

SEQ ID NO: 35037 - DNA, 21 bp, Homo sapiens
ccatgtggtcrcctgtaaaca

SEQ ID NO: 35038 - DNA, 21 bp, Homo sapiens
tttgcccctgwcggtcccctg

SEQ ID NO: 35039 - DNA, 21 bp, Homo sapiens
gaggggcagcyagtggggagc

SEQ ID NO: 35040 - DNA, 21 bp, Homo sapiens
cagagagccaygctgaagaag

SEQ ID NO: 35041 - DNA, 21 bp, Homo sapiens
ccctctatcckggccctgggt

SEQ ID NO: 35042 - DNA, 21 bp, Homo sapiens
tctgttcttcygggcaagaca

SEQ ID NO: 35043 - DNA, 21 bp, Homo sapiens
ccattctcggmctccattgtc

SEQ ID NO: 35044 - DNA, 21 bp, Homo sapiens
gaggggatgamctccctatct

SEQ ID NO: 35045 - DNA, 21 bp, Homo sapiens
cttttccttaycggtgtgtac

SEQ ID NO: 35046 - DNA, 21 bp, Homo sapiens
cattccttccrtaatttgctt

SEQ ID NO: 35047 - DNA, 21 bp, Homo sapiens
tctgccacttrttggcatgtg

SEQ ID NO: 35048 - DNA, 21 bp, Homo sapiens
agttctgtccrgtttaagaga

SEQ ID NO: 35049 - DNA, 21 bp, Homo sapiens
cgattctgttsagtattagtt

SEQ ID NO: 35050 - DNA, 21 bp, Homo sapiens
ggtcaagatcrgctctgacca

SEQ ID NO: 35051 - DNA, 21 bp, Homo sapiens
caccctcgtcrcagctgggtg

SEQ ID NO: 35052 - DNA, 21 bp, Homo sapiens
ctcaggtgacmtgccatctga

SEQ ID NO: 35053 - DNA, 21 bp, Homo sapiens
caatcaccttyctttcaggtt

SEQ ID NO: 35054 - DNA, 21 bp, Homo sapiens
gtggttccctrtccagggctg

SEQ ID NO: 35055 - DNA, 21 bp, Homo sapiens
aatcatttatrtaacacccat

SEQ ID NO: 35056 - DNA, 21 bp, Homo sapiens
cttcctgtagrggcagcaaca

SEQ ID NO: 35057 - DNA, 21 bp, Homo sapiens
tgctcttccayatttgaagca

SEQ ID NO: 35058 - DNA, 21 bp, Homo sapiens
gaggcctcacwgtgtgcatcc

SEQ ID NO: 35059 - DNA, 21 bp, Homo sapiens
aagctctgatmtatagccggc

SEQ ID NO: 35060 - DNA, 21 bp, Homo sapiens
cagaaaaccaycctccagcga

SEQ ID NO: 35061 - DNA, 21 bp, Homo sapiens
acgctatgttrgtgacgctgg

SEQ ID NO: 35062 - DNA, 21 bp, Homo sapiens
gggacccaagrcctgagcccc

SEQ ID NO: 35063 - DNA, 21 bp, Homo sapiens
aagctccttgsgtagagggaa

SEQ ID NO: 35064 - DNA, 21 bp, Homo sapiens
agatgagcttyaggtttggaa

SEQ ID NO: 35065 - DNA, 21 bp, Homo sapiens
tcctgagtgcrctgagcccca

SEQ ID NO: 35066 - DNA, 21 bp, Homo sapiens
cacaaagccartcatctacag

SEQ ID NO: 35067 - DNA, 21 bp, Homo sapiens
ccctcatagcytaatctacaa

SEQ ID NO: 35068 - DNA, 21 bp, Homo sapiens
aggtgtaactragcggaaaga

SEQ ID NO: 35069 - DNA, 21 bp, Homo sapiens
gaactaaggcraggctgtgca

SEQ ID NO: 35070 - DNA, 21 bp, Homo sapiens
agccaacaggycccccattgg

SEQ ID NO: 35071 - DNA, 21 bp, Homo sapiens
aaactgggggrcggccccatg

SEQ ID NO: 35072 - DNA, 21 bp, Homo sapiens
agggtaatctsttagactaga

SEQ ID NO: 35073 - DNA, 21 bp, Homo sapiens
gaggggacatyggtgcctgcc

SEQ ID NO: 35074 - DNA, 21 bp, Homo sapiens
tgctccaaggrgaaggggtca

SEQ ID NO: 35075 - DNA, 21 bp, Homo sapiens
aatagactggrtatctcctcc

SEQ ID NO: 35076 - DNA, 21 bp, Homo sapiens
ctcttcagggrgcagggagag

SEQ ID NO: 35077 - DNA, 21 bp, Homo sapiens
tctgctctgcygaggcgaaag

SEQ ID NO: 35078 - DNA, 21 bp, Homo sapiens
aactcatttawtgcccacaac

SEQ ID NO: 35079 - DNA, 21 bp, Homo sapiens
accatctgggmgaaactagga

SEQ ID NO: 35080 - DNA, 21 bp, Homo sapiens
tttaatctacygagattttgt

SEQ ID NO: 35081 - DNA, 21 bp, Homo sapiens
tgcagctgccytttccagggg

SEQ ID NO: 35082 - DNA, 21 bp, Homo sapiens
gcagaaatccyacgcctatct

SEQ ID NO: 35083 - DNA, 21 bp, Homo sapiens
actctagtgcrgtatcaaaac

SEQ ID NO: 35084 - DNA, 21 bp, Homo sapiens
ctctcagccgracctcaccag

SEQ ID NO: 35085 - DNA, 21 bp, Homo sapiens
gaggtcagtgrgtgggagggc

SEQ ID NO: 35086 - DNA, 21 bp, Homo sapiens
acttaactcaygacagagatg

SEQ ID NO: 35087 - DNA, 21 bp, Homo sapiens
attctgcctcktctgtcattg

SEQ ID NO: 35088 - DNA, 21 bp, Homo sapiens
agccatttttyctttctggcg

SEQ ID NO: 35089 - DNA, 21 bp, Homo sapiens
agctttgtgasctaagaaagg

SEQ ID NO: 35090 - DNA, 21 bp, Homo sapiens
cttgctgtgaytgacctgccc

SEQ ID NO: 35091 - DNA, 21 bp, Homo sapiens
tatgtgggcargaacagctat

SEQ ID NO: 35092 - DNA, 21 bp, Homo sapiens
caaactatgtwacatggcttt

SEQ ID NO: 35093 - DNA, 21 bp, Homo sapiens
tcaattaacasaggcttgctt

SEQ ID NO: 35094 - DNA, 21 bp, Homo sapiens
gtggactctgmgccttcagtg

SEQ ID NO: 35095 - DNA, 21 bp, Homo sapiens
cactgtgttcmttcagcactc

SEQ ID NO: 35096 - DNA, 21 bp, Homo sapiens
cctgattcccyggcgtcctaa

SEQ ID NO: 35097 - DNA, 21 bp, Homo sapiens
tctgtgcattrattttaaata

SEQ ID NO: 35098 - DNA, 21 bp, Homo sapiens
ttgctgttttmtttctttact

SEQ ID NO: 35099 - DNA, 21 bp, Homo sapiens
tgtgtgcctawggtcatgagt

SEQ ID NO: 35100 - DNA, 21 bp, Homo sapiens
acaaatgcaaragaacccaga

SEQ ID NO: 35101 - DNA, 21 bp, Homo sapiens
attttctgacygtttatattt

SEQ ID NO: 35102 - DNA, 21 bp, Homo sapiens
acagcactttkattattaagg

SEQ ID NO: 35103 - DNA, 21 bp, Homo sapiens
tgccctttaamaataaaaaat

SEQ ID NO: 35104 - DNA, 21 bp, Homo sapiens
tgttttgctgrtcaggacctc

SEQ ID NO: 35105 - DNA, 21 bp, Homo sapiens
ctggcaggtcrtgacaggctg

SEQ ID NO: 35106 - DNA, 21 bp, Homo sapiens
ctgctcagcamaagaacccag

SEQ ID NO: 35107 - DNA, 21 bp, Homo sapiens
accatgagatytgtgggaaaa

SEQ ID NO: 35108 - DNA, 21 bp, Homo sapiens
aggctcaaggstaagaagaag

SEQ ID NO: 35109 - DNA, 21 bp, Homo sapiens
agcaaaatttkttgaaggaaa

SEQ ID NO: 35110 - DNA, 21 bp, Homo sapiens
tagctattctrttttctttgg

SEQ ID NO: 35111 - DNA, 21 bp, Homo sapiens
agttatgaccrtgttcatttg

SEQ ID NO: 35112 - DNA, 21 bp, Homo sapiens
tagggaacccmcctcaggagg

SEQ ID NO: 35113 - DNA, 21 bp, Homo sapiens
tcttctaagcrcttaagaagt

SEQ ID NO: 35114 - DNA, 21 bp, Homo sapiens
ttactaaatgrgaataaagtt

SEQ ID NO: 35115 - DNA, 21 bp, Homo sapiens
gagagtctatkatgaatatgt

SEQ ID NO: 35116 - DNA, 21 bp, Homo sapiens
gggtacttaargtatagtttc

SEQ ID NO: 35117 - DNA, 21 bp, Homo sapiens
gggccaaggcygaggttgtgt

SEQ ID NO: 35118 - DNA, 21 bp, Homo sapiens
gtaagtggtaraatacccctc

SEQ ID NO: 35119 - DNA, 21 bp, Homo sapiens
aactttcagcrtgttcagcag

SEQ ID NO: 35120 - DNA, 21 bp, Homo sapiens
tggatctcttraatttatact

SEQ ID NO: 35121 - DNA, 21 bp, Homo sapiens
tcgtgtgctcrtcttcacatt

SEQ ID NO: 35122 - DNA, 21 bp, Homo sapiens
attttattgawcttattattt

SEQ ID NO: 35123 - DNA, 21 bp, Homo sapiens
tcaagtcaacrtgatacccag

SEQ ID NO: 35124 - DNA, 21 bp, Homo sapiens
gctcttacaascaatcccatt

SEQ ID NO: 35125 - DNA, 21 bp, Homo sapiens
tatatcctccyccctgcatct

SEQ ID NO: 35126 - DNA, 21 bp, Homo sapiens
tgctcacatckttgtaaactg

SEQ ID NO: 35127 - DNA, 21 bp, Homo sapiens
gttgaagattracaaggaggt

SEQ ID NO: 35128 - DNA, 21 bp, Homo sapiens
actgctagaakgactatacca

SEQ ID NO: 35129 - DNA, 21 bp, Homo sapiens
gaatgattcawtagaaagaaa

SEQ ID NO: 35130 - DNA, 21 bp, Homo sapiens
ggcctcatctmcttcagggta

SEQ ID NO: 35131 - DNA, 21 bp, Homo sapiens
actttctgaaygattatgaca

SEQ ID NO: 35132 - DNA, 21 bp, Homo sapiens
tagttttctcygtaactacag

SEQ ID NO: 35133 - DNA, 21 bp, Homo sapiens
tataaccatcrggccttctca

SEQ ID NO: 35134 - DNA, 21 bp, Homo sapiens
atcttcatctstgcaaaaagg

SEQ ID NO: 35135 - DNA, 21 bp, Homo sapiens
gtctttgagtytgttatcaca

SEQ ID NO: 35136 - DNA, 21 bp, Homo sapiens
tgtcacaagcrattcttgcct

SEQ ID NO: 35137 - DNA, 21 bp, Homo sapiens
atgatattctrttagtcaaag

SEQ ID NO: 35138 - DNA, 21 bp, Homo sapiens
attgagttcartagtggtgga

SEQ ID NO: 35139 - DNA, 21 bp, Homo sapiens
caaccagaaawctctctcact

SEQ ID NO: 35140 - DNA, 21 bp, Homo sapiens
aacgtactacwagcctacctc

SEQ ID NO: 35141 - DNA, 21 bp, Homo sapiens
taactcagggycagttctctt

SEQ ID NO: 35142 - DNA, 21 bp, Homo sapiens
tcttggttctsctttccttac

SEQ ID NO: 35143 - DNA, 21 bp, Homo sapiens
tgcttccttcmgcccttttct

SEQ ID NO: 35144 - DNA, 21 bp, Homo sapiens
ggcaggtttcrgtcccctgaa

SEQ ID NO: 35145 - DNA, 21 bp, Homo sapiens
tgtcccgcacyggagcagctt

SEQ ID NO: 35146 - DNA, 21 bp, Homo sapiens
ttaaaagataragtaaatcct

SEQ ID NO: 35147 - DNA, 21 bp, Homo sapiens
tggtgaagacktggcactcca

SEQ ID NO: 35148 - DNA, 21 bp, Homo sapiens
ttgtgaggtasatcaactttg

SEQ ID NO: 35149 - DNA, 21 bp, Homo sapiens
gtaacgctgcygaagtttcat

SEQ ID NO: 35150 - DNA, 21 bp, Homo sapiens
aatgtttagtrgtgaagcaag

SEQ ID NO: 35151 - DNA, 21 bp, Homo sapiens
tgaaggccacmgcagtcaagc

SEQ ID NO: 35152 - DNA, 21 bp, Homo sapiens
agaattcatawgtggcaaatt

SEQ ID NO: 35153 - DNA, 21 bp, Homo sapiens
tacaatacaayggcctattaa

SEQ ID NO: 35154 - DNA, 21 bp, Homo sapiens
aaatggactarttcttcaaaa

SEQ ID NO: 35155 - DNA, 21 bp, Homo sapiens
ccctttggatktgggtctctc

SEQ ID NO: 35156 - DNA, 21 bp, Homo sapiens
atagctcaagrtcacaaagct

SEQ ID NO: 35157 - DNA, 21 bp, Homo sapiens
gtcattgggtycgtatggaaa

SEQ ID NO: 35158 - DNA, 21 bp, Homo sapiens
gcggccggagycttccctgct

SEQ ID NO: 35159 - DNA, 21 bp, Homo sapiens
aggtagcattyggcctcaggg

SEQ ID NO: 35160 - DNA, 21 bp, Homo sapiens
cttcaagactrttttggatat

SEQ ID NO: 35161 - DNA, 21 bp, Homo sapiens
tgcgtttaatktagaggtgac

SEQ ID NO: 35162 - DNA, 21 bp, Homo sapiens
tcaccatctcraatttcctgg

SEQ ID NO: 35163 - DNA, 21 bp, Homo sapiens
ttttgcacccrttaacttacc

SEQ ID NO: 35164 - DNA, 21 bp, Homo sapiens
atcaagccctrtacacataaa

SEQ ID NO: 35165 - DNA, 21 bp, Homo sapiens
cgatcaatttyctatcctatc

SEQ ID NO: 35166 - DNA, 21 bp, Homo sapiens
gaaatgggacygttgaacagt

SEQ ID NO: 35167 - DNA, 21 bp, Homo sapiens
gctttgccatmtcaagtaaaa

SEQ ID NO: 35168 - DNA, 21 bp, Homo sapiens
gaaaatagagwcttaaaaaat

SEQ ID NO: 35169 - DNA, 21 bp, Homo sapiens
gacgactgcartcagtcctca

SEQ ID NO: 35170 - DNA, 21 bp, Homo sapiens
acatactcaaytattctagga

SEQ ID NO: 35171 - DNA, 21 bp, Homo sapiens
taaatggcccytctattttta

SEQ ID NO: 35172 - DNA, 21 bp, Homo sapiens
ttcaggttagrgacaggggtg

SEQ ID NO: 35173 - DNA, 21 bp, Homo sapiens
acaattgttgmgctcaggaaa

SEQ ID NO: 35174 - DNA, 21 bp, Homo sapiens
agtcttcatgyctctaccttt

SEQ ID NO: 35175 - DNA, 21 bp, Homo sapiens
aaaaatatttrtacgcttcgt

SEQ ID NO: 35176 - DNA, 21 bp, Homo sapiens
tgatcttcagyaaaaagaggt

SEQ ID NO: 35177 - DNA, 21 bp, Homo sapiens
aaagctccccratctccataa

SEQ ID NO: 35178 - DNA, 21 bp, Homo sapiens
aaatgtcaccrtgcaagtata

SEQ ID NO: 35179 - DNA, 21 bp, Homo sapiens
aaacttttctrtttagtcaga

SEQ ID NO: 35180 - DNA, 21 bp, Homo sapiens
ggcctcaccckagttcttcat

SEQ ID NO: 35181 - DNA, 21 bp, Homo sapiens
gctgctcttcygagacttcca

SEQ ID NO: 35182 - DNA, 21 bp, Homo sapiens
ccagagggcgkaagcactgat

SEQ ID NO: 35183 - DNA, 21 bp, Homo sapiens
gaaggcagctrttttcattag

SEQ ID NO: 35184 - DNA, 21 bp, Homo sapiens
caatatagtcrcgtgggtctg

SEQ ID NO: 35185 - DNA, 21 bp, Homo sapiens
atacctgccayaaggtaacaa

SEQ ID NO: 35186 - DNA, 21 bp, Homo sapiens
atcacccttaycacatttctc

SEQ ID NO: 35187 - DNA, 21 bp, Homo sapiens
gctgtgagtgwattattacca

SEQ ID NO: 35188 - DNA, 21 bp, Homo sapiens
ttggaaggtasattttcttgt

SEQ ID NO: 35189 - DNA, 21 bp, Homo sapiens
agcacttccartctcatttgg

SEQ ID NO: 35190 - DNA, 21 bp, Homo sapiens
cgtgaatctgmgtaaattgct

SEQ ID NO: 35191 - DNA, 21 bp, Homo sapiens
gtttagtttgrctgattcagg

SEQ ID NO: 35192 - DNA, 21 bp, Homo sapiens
ctcatcttgtmccatcaacaa

SEQ ID NO: 35193 - DNA, 21 bp, Homo sapiens
agaggcatgtygaatgtcata

SEQ ID NO: 35194 - DNA, 21 bp, Homo sapiens
cctggttatcktttatcttcc

SEQ ID NO: 35195 - DNA, 21 bp, Homo sapiens
ttttcatgaasagcccttgtg

SEQ ID NO: 35196 - DNA, 21 bp, Homo sapiens
agccccctcakccccccagac

SEQ ID NO: 35197 - DNA, 21 bp, Homo sapiens
aatgttccccrgcactcacgg

SEQ ID NO: 35198 - DNA, 21 bp, Homo sapiens
aggccacattscagcaagctc

SEQ ID NO: 35199 - DNA, 21 bp, Homo sapiens
caccaaattckgcaggttaaa

SEQ ID NO: 35200 - DNA, 21 bp, Homo sapiens
aagccacaagktgtgttcttg

SEQ ID NO: 35201 - DNA, 21 bp, Homo sapiens
aaaaatgcgcycccaggacca

SEQ ID NO: 35202 - DNA, 21 bp, Homo sapiens
ggatttgagtmtggatctgct

SEQ ID NO: 35203 - DNA, 21 bp, Homo sapiens
cagcacacacrggtttctaaa

SEQ ID NO: 35204 - DNA, 21 bp, Homo sapiens
cctcttgatakaactttggtt

SEQ ID NO: 35205 - DNA, 21 bp, Homo sapiens
ctgtgtccctrtacctagagc

SEQ ID NO: 35206 - DNA, 21 bp, Homo sapiens
gacacatgttytaaaaggttt

SEQ ID NO: 35207 - DNA, 21 bp, Homo sapiens
ttgctgaaatrtgtatacaaa

SEQ ID NO: 35208 - DNA, 21 bp, Homo sapiens
aatctattcayagtagcaata

SEQ ID NO: 35209 - DNA, 21 bp, Homo sapiens
caaggacagaytggccctctc

SEQ ID NO: 35210 - DNA, 21 bp, Homo sapiens
agcattcatgygtacctcccg

SEQ ID NO: 35211 - DNA, 21 bp, Homo sapiens
atttttctaaytcccctggaa

SEQ ID NO: 35212 - DNA, 21 bp, Homo sapiens
ggaggatctayatatgcattc

SEQ ID NO: 35213 - DNA, 21 bp, Homo sapiens
tcaagggcagratgttgggca

SEQ ID NO: 35214 - DNA, 21 bp, Homo sapiens
aagcactgaaycctgtttagt

SEQ ID NO: 35215 - DNA, 21 bp, Homo sapiens
tggaagacttsagcctgctca

SEQ ID NO: 35216 - DNA, 21 bp, Homo sapiens
cctatccggtstgtgatggta

SEQ ID NO: 35217 - DNA, 21 bp, Homo sapiens
ctcctccattyaggtggtctg

SEQ ID NO: 35218 - DNA, 21 bp, Homo sapiens
agctcaatggktggcttcctc

SEQ ID NO: 35219 - DNA, 21 bp, Homo sapiens
cacactgatcrtggcaggatg

SEQ ID NO: 35220 - DNA, 21 bp, Homo sapiens
acactatctgyaggcgagtct

SEQ ID NO: 35221 - DNA, 21 bp, Homo sapiens
aaatactttcygtaaggttaa

SEQ ID NO: 35222 - DNA, 21 bp, Homo sapiens
agagaacataytttacatctg

SEQ ID NO: 35223 - DNA, 21 bp, Homo sapiens
tcttccaatgygttaaaggca

SEQ ID NO: 35224 - DNA, 21 bp, Homo sapiens
gaaaatgaatmaatgaaggat

SEQ ID NO: 35225 - DNA, 21 bp, Homo sapiens
acgtatgtgcmtgcagacaaa

SEQ ID NO: 35226 - DNA, 21 bp, Homo sapiens
tagcataatayaatcactttt

SEQ ID NO: 35227 - DNA, 21 bp, Homo sapiens
tgcaaatttgycatcataata

SEQ ID NO: 35228 - DNA, 21 bp, Homo sapiens
ctctttttctrttatgtttct

SEQ ID NO: 35229 - DNA, 21 bp, Homo sapiens
caagctattastgcaaagata

SEQ ID NO: 35230 - DNA, 21 bp, Homo sapiens
gcggaatatcytgtgggcatg

SEQ ID NO: 35231 - DNA, 21 bp, Homo sapiens
tgtgaagttcyataaacccaa

SEQ ID NO: 35232 - DNA, 21 bp, Homo sapiens
tcatgttccawgaagtaattg

SEQ ID NO: 35233 - DNA, 21 bp, Homo sapiens
tggatctcagycatactctag

SEQ ID NO: 35234 - DNA, 21 bp, Homo sapiens
ctattttgtgkcacataatgc

SEQ ID NO: 35235 - DNA, 21 bp, Homo sapiens
ttttaaaaaasggaggaaggt

SEQ ID NO: 35236 - DNA, 21 bp, Homo sapiens
agtctggctcmgctgacagcc

SEQ ID NO: 35237 - DNA, 21 bp, Homo sapiens
tctgacccagrttgtctgaac

SEQ ID NO: 35238 - DNA, 21 bp, Homo sapiens
gtagctgcagrtctgagcctc

SEQ ID NO: 35239 - DNA, 21 bp, Homo sapiens
gcgcagacagractgggctag

SEQ ID NO: 35240 - DNA, 21 bp, Homo sapiens
ctatatacaasatgagcccaa

SEQ ID NO: 35241 - DNA, 21 bp, Homo sapiens
tgacctgtctkgtccgtgagt

SEQ ID NO: 35242 - DNA, 21 bp, Homo sapiens
gtgctgaagtsaaaatctttc

SEQ ID NO: 35243 - DNA, 21 bp, Homo sapiens
tcatgtacccsccgtagtctc

SEQ ID NO: 35244 - DNA, 21 bp, Homo sapiens
agattggcatycgttcttggc

SEQ ID NO: 35245 - DNA, 21 bp, Homo sapiens
agaggctccasagagaacctc

SEQ ID NO: 35246 - DNA, 21 bp, Homo sapiens
ccatgaagggyggcctgactg

SEQ ID NO: 35247 - DNA, 21 bp, Homo sapiens
gctcctggtaygggtttctcc

SEQ ID NO: 35248 - DNA, 21 bp, Homo sapiens
tctgctcaacmaaagaggcct

SEQ ID NO: 35249 - DNA, 21 bp, Homo sapiens
cagcatggtcyggcaaggagc

SEQ ID NO: 35250 - DNA, 21 bp, Homo sapiens
atgtgggacarctccgtgtag

SEQ ID NO: 35251 - DNA, 21 bp, Homo sapiens
acgtctttccycagtttccta

SEQ ID NO: 35252 - DNA, 21 bp, Homo sapiens
tgcttgctgcrtgtacctcac

SEQ ID NO: 35253 - DNA, 21 bp, Homo sapiens
tcacccctccrtccctggatc

SEQ ID NO: 35254 - DNA, 21 bp, Homo sapiens
cctctggtgargatgaagaag

SEQ ID NO: 35255 - DNA, 21 bp, Homo sapiens
acgtaacctgktccagtgtca

SEQ ID NO: 35256 - DNA, 21 bp, Homo sapiens
ctttgtgtccrctctttaatt

SEQ ID NO: 35257 - DNA, 21 bp, Homo sapiens
ttggggtctgyagtattggtg

SEQ ID NO: 35258 - DNA, 21 bp, Homo sapiens
ccttcaaaaasctcatgggca

SEQ ID NO: 35259 - DNA, 21 bp, Homo sapiens
tttgataaagsctgtagtctc

SEQ ID NO: 35260 - DNA, 21 bp, Homo sapiens
gcctcctgcaygctactcatg

SEQ ID NO: 35261 - DNA, 21 bp, Homo sapiens
cctcttcaacrtctcagccta

SEQ ID NO: 35262 - DNA, 21 bp, Homo sapiens
gacgaaaccarcacatataca

SEQ ID NO: 35263 - DNA, 21 bp, Homo sapiens
gtaaaacacaycagaattatc

SEQ ID NO: 35264 - DNA, 21 bp, Homo sapiens
tgagcatgackcttggcggtg

SEQ ID NO: 35265 - DNA, 21 bp, Homo sapiens
tattaaataawcatggatgtg

SEQ ID NO: 35266 - DNA, 21 bp, Homo sapiens
tgcagaggctwcacagtgggg

SEQ ID NO: 35267 - DNA, 21 bp, Homo sapiens
ccagtgaggcyggaataaaag

SEQ ID NO: 35268 - DNA, 21 bp, Homo sapiens
aactaacctayagcgacaaaa

SEQ ID NO: 35269 - DNA, 21 bp, Homo sapiens
atggatcattmtagtgtctgt

SEQ ID NO: 35270 - DNA, 21 bp, Homo sapiens
tgctgaatagyattccatcat

SEQ ID NO: 35271 - DNA, 21 bp, Homo sapiens
cacctcctctyctggggtaag

SEQ ID NO: 35272 - DNA, 21 bp, Homo sapiens
gacatctcagsagggtttatt

SEQ ID NO: 35273 - DNA, 21 bp, Homo sapiens
agggcaatacrgatatatttg

SEQ ID NO: 35274 - DNA, 21 bp, Homo sapiens
tctttttaatycacttcttcc

SEQ ID NO: 35275 - DNA, 21 bp, Homo sapiens
gtcaattttaygtggatacta

SEQ ID NO: 35276 - DNA, 21 bp, Homo sapiens
aggcagcttcrttttatagaa

SEQ ID NO: 35277 - DNA, 21 bp, Homo sapiens
atcctgcttgsagttggaggt

SEQ ID NO: 35278 - DNA, 21 bp, Homo sapiens
gggtagaagtkgacaggaatc

SEQ ID NO: 35279 - DNA, 21 bp, Homo sapiens
tggccgtaagsagggtctgtc

SEQ ID NO: 35280 - DNA, 21 bp, Homo sapiens
cttggcttatyttctcccctt

SEQ ID NO: 35281 - DNA, 21 bp, Homo sapiens
actttgtggcrattattgtca

SEQ ID NO: 35282 - DNA, 21 bp, Homo sapiens
cagactacccsctaatgtgcc

SEQ ID NO: 35283 - DNA, 21 bp, Homo sapiens
aatttacaaayaggatttgag

SEQ ID NO: 35284 - DNA, 21 bp, Homo sapiens
gtgaattctawatctgataaa

SEQ ID NO: 35285 - DNA, 21 bp, Homo sapiens
ttgacaactcrttttaagaaa

SEQ ID NO: 35286 - DNA, 21 bp, Homo sapiens
ttttgaaaatkacagtgttat

SEQ ID NO: 35287 - DNA, 21 bp, Homo sapiens
tcctcctcctyctctgggctc

SEQ ID NO: 35288 - DNA, 21 bp, Homo sapiens
tgatttttggytctcattaaa

SEQ ID NO: 35289 - DNA, 21 bp, Homo sapiens
ggtgaacttcratcactgttg

SEQ ID NO: 35290 - DNA, 21 bp, Homo sapiens
catgaaatgtsttttaatcac

SEQ ID NO: 35291 - DNA, 21 bp, Homo sapiens
agaaataaacrtgtcaaaatc

SEQ ID NO: 35292 - DNA, 21 bp, Homo sapiens
attgagaaaaytgactttcaa

SEQ ID NO: 35293 - DNA, 21 bp, Homo sapiens
tacctaagtcrtatcttcaat

SEQ ID NO: 35294 - DNA, 21 bp, Homo sapiens
aacatggtccrgaagattgtg

SEQ ID NO: 35295 - DNA, 21 bp, Homo sapiens
gtttcctttcytggagaaatt

SEQ ID NO: 35296 - DNA, 21 bp, Homo sapiens
tgtctcttcarcagcccaggg

SEQ ID NO: 35297 - DNA, 21 bp, Homo sapiens
ccggtgcgaayggaacacagg

SEQ ID NO: 35298 - DNA, 21 bp, Homo sapiens
ccttccccgcwctgctctccc

SEQ ID NO: 35299 - DNA, 21 bp, Homo sapiens
tccacgtcccrgagccgggag

SEQ ID NO: 35300 - DNA, 21 bp, Homo sapiens
cccagcagagrccccgggaag

SEQ ID NO: 35301 - DNA, 21 bp, Homo sapiens
cctttcccttsgagacaggca

SEQ ID NO: 35302 - DNA, 21 bp, Homo sapiens
acggggtgtckggggagggca

SEQ ID NO: 35303 - DNA, 21 bp, Homo sapiens
cagtccagggkgcctccatcc

SEQ ID NO: 35304 - DNA, 21 bp, Homo sapiens
ggtgattttayaagggggtgc

SEQ ID NO: 35305 - DNA, 21 bp, Homo sapiens
tagctgggagragggaggcgg

SEQ ID NO: 35306 - DNA, 21 bp, Homo sapiens
gtgtcccgccmtcctcagtcc

SEQ ID NO: 35307 - DNA, 21 bp, Homo sapiens
tcacaggaggygctgtggagc

SEQ ID NO: 35308 - DNA, 21 bp, Homo sapiens
gccacgccccrgggagagagc

SEQ ID NO: 35309 - DNA, 21 bp, Homo sapiens
ctggctttttmaatggtgttt

SEQ ID NO: 35310 - DNA, 21 bp, Homo sapiens
tccctgctccrcgtctgcgcc

SEQ ID NO: 35311 - DNA, 21 bp, Homo sapiens
actgccaggcmtgggcggttc

SEQ ID NO: 35312 - DNA, 21 bp, Homo sapiens
catcctgagcrttcccagctc

SEQ ID NO: 35313 - DNA, 21 bp, Homo sapiens
catcttgattycagacttctg

SEQ ID NO: 35314 - DNA, 21 bp, Homo sapiens
cgaagggaaamcccagccgga

SEQ ID NO: 35315 - DNA, 21 bp, Homo sapiens
gacgacacgcrtgtggacagc

SEQ ID NO: 35316 - DNA, 21 bp, Homo sapiens
agtcggggtgygtggtgagag

SEQ ID NO: 35317 - DNA, 21 bp, Homo sapiens
tcactgttccmacttcccaaa

SEQ ID NO: 35318 - DNA, 21 bp, Homo sapiens
gtcaggaggckcctcctgggg

SEQ ID NO: 35319 - DNA, 21 bp, Homo sapiens
tgagggatacsaagggactca

SEQ ID NO: 35320 - DNA, 21 bp, Homo sapiens
tttatccagcrtgtgcaacag

SEQ ID NO: 35321 - DNA, 21 bp, Homo sapiens
gtgtgtttctrcacactgaca

SEQ ID NO: 35322 - DNA, 21 bp, Homo sapiens
agccttagacyagcgatggcc

SEQ ID NO: 35323 - DNA, 21 bp, Homo sapiens
cgtcctactaygagattaatc

SEQ ID NO: 35324 - DNA, 21 bp, Homo sapiens
aagtgtgacgstgacacctct

SEQ ID NO: 35325 - DNA, 21 bp, Homo sapiens
tgcatgtgcaygtggtccatg

SEQ ID NO: 35326 - DNA, 21 bp, Homo sapiens
tagggtcatcygtcccagctc

SEQ ID NO: 35327 - DNA, 21 bp, Homo sapiens
atttggctccrtccatgccct

SEQ ID NO: 35328 - DNA, 21 bp, Homo sapiens
tgatggacagkggcagcacca

SEQ ID NO: 35329 - DNA, 21 bp, Homo sapiens
agtcagggtaygtatgttaac

SEQ ID NO: 35330 - DNA, 21 bp, Homo sapiens
tgtttatatgkgcagtgactt

SEQ ID NO: 35331 - DNA, 21 bp, Homo sapiens
tgtcacttacrgcagttttcg

SEQ ID NO: 35332 - DNA, 21 bp, Homo sapiens
cctcacagaarggtttgaggg

SEQ ID NO: 35333 - DNA, 21 bp, Homo sapiens
cagataaaggrgctagaatgt

SEQ ID NO: 35334 - DNA, 21 bp, Homo sapiens
ttgtatcccgrctgtgtgtct

SEQ ID NO: 35335 - DNA, 21 bp, Homo sapiens
atccctgaccycacaacccac

SEQ ID NO: 35336 - DNA, 21 bp, Homo sapiens
gcaactggctstttctgggac

SEQ ID NO: 35337 - DNA, 21 bp, Homo sapiens
cgtcgcccacrggctcctttc

SEQ ID NO: 35338 - DNA, 21 bp, Homo sapiens
ttttacttctrtttggtgaca

SEQ ID NO: 35339 - DNA, 21 bp, Homo sapiens
tcccaggaggmggagggccta

SEQ ID NO: 35340 - DNA, 21 bp, Homo sapiens
gcgttgccttscccccccctc

SEQ ID NO: 35341 - DNA, 21 bp, Homo sapiens
gtgtgaccctyggtgcctggc

SEQ ID NO: 35342 - DNA, 21 bp, Homo sapiens
aaggacagccmgcagagctgc

SEQ ID NO: 35343 - DNA, 21 bp, Homo sapiens
tctgaccggcrgctcccctcc

SEQ ID NO: 35344 - DNA, 21 bp, Homo sapiens
atcttccaccrggagcgcccg

SEQ ID NO: 35345 - DNA, 21 bp, Homo sapiens
ggaaagaaggyagccagtggg

SEQ ID NO: 35346 - DNA, 21 bp, Homo sapiens
aggagacagcrtttcccgggc

SEQ ID NO: 35347 - DNA, 21 bp, Homo sapiens
cctcactcgtytcccctttga

SEQ ID NO: 35348 - DNA, 21 bp, Homo sapiens
cacaccagggyggccgagagc

SEQ ID NO: 35349 - DNA, 21 bp, Homo sapiens
cattggtgagkcctggactaa

SEQ ID NO: 35350 - DNA, 21 bp, Homo sapiens
gtctgcgcgcygccttccacg

SEQ ID NO: 35351 - DNA, 21 bp, Homo sapiens
tgccttttcgygactgtggca

SEQ ID NO: 35352 - DNA, 21 bp, Homo sapiens
ctgtgggtggyccccaactca

SEQ ID NO: 35353 - DNA, 21 bp, Homo sapiens
gcctggagctygggacacccc

SEQ ID NO: 35354 - DNA, 21 bp, Homo sapiens
ttgtggcccakccctggcctc

SEQ ID NO: 35355 - DNA, 21 bp, Homo sapiens
acttaggttaytctaccactt

SEQ ID NO: 35356 - DNA, 21 bp, Homo sapiens
ggagatccccrgttccaccct

SEQ ID NO: 35357 - DNA, 21 bp, Homo sapiens
tggggaccccrgggaccaaga

SEQ ID NO: 35358 - DNA, 21 bp, Homo sapiens
ccctgaagacyggattcggtt

SEQ ID NO: 35359 - DNA, 21 bp, Homo sapiens
aactctgaacmtttttttttc

SEQ ID NO: 35360 - DNA, 21 bp, Homo sapiens
gttgccagacygatgacagag

SEQ ID NO: 35361 - DNA, 21 bp, Homo sapiens
tgctggcctasctcatatgtc

SEQ ID NO: 35362 - DNA, 21 bp, Homo sapiens
tggccccaccyggggtgctct

SEQ ID NO: 35363 - DNA, 21 bp, Homo sapiens
ccatgctaggyactgtcactt

SEQ ID NO: 35364 - DNA, 21 bp, Homo sapiens
tacaattgcayccctcatttc

SEQ ID NO: 35365 - DNA, 21 bp, Homo sapiens
cccaggtgggmagcctctgcg

SEQ ID NO: 35366 - DNA, 21 bp, Homo sapiens
caagttcccayagatgagggg

SEQ ID NO: 35367 - DNA, 21 bp, Homo sapiens
aggctggaccrtgcatttaat

SEQ ID NO: 35368 - DNA, 21 bp, Homo sapiens
gtcaggggatyctgaagactc

SEQ ID NO: 35369 - DNA, 21 bp, Homo sapiens
tgatggagacktccatcaatg

SEQ ID NO: 35370 - DNA, 21 bp, Homo sapiens
ggggaatggtrctgtgtatct

SEQ ID NO: 35371 - DNA, 21 bp, Homo sapiens
gtcacagccartcacgtagac

SEQ ID NO: 35372 - DNA, 21 bp, Homo sapiens
ccacctgtgarggttcagaac

SEQ ID NO: 35373 - DNA, 21 bp, Homo sapiens
tccctggcctstgtgtgctag

SEQ ID NO: 35374 - DNA, 21 bp, Homo sapiens
agctttatcaytaaaaaataa

SEQ ID NO: 35375 - DNA, 21 bp, Homo sapiens
aaaaaatagcrtcatgcaatg

SEQ ID NO: 35376 - DNA, 21 bp, Homo sapiens
aatacacagaraagtaaaaca

SEQ ID NO: 35377 - DNA, 21 bp, Homo sapiens
ggagcatttgyatgtaaggaa

SEQ ID NO: 35378 - DNA, 21 bp, Homo sapiens
atttcttctayatttattagc

SEQ ID NO: 35379 - DNA, 21 bp, Homo sapiens
gtttcagtgcycccatagcca

SEQ ID NO: 35380 - DNA, 21 bp, Homo sapiens
ctgtggcagaygcagatcaga

SEQ ID NO: 35381 - DNA, 21 bp, Homo sapiens
tgaaaagcaamgtttgtttaa

SEQ ID NO: 35382 - DNA, 21 bp, Homo sapiens
tactatgccaygggagttttt

SEQ ID NO: 35383 - DNA, 21 bp, Homo sapiens
ttcctagggayaccttctaac

SEQ ID NO: 35384 - DNA, 21 bp, Homo sapiens
gcgaaacaaaraaacaagatg

SEQ ID NO: 35385 - DNA, 21 bp, Homo sapiens
aatcaaggttwgggaaaaacc

SEQ ID NO: 35386 - DNA, 21 bp, Homo sapiens
atatgaagtgrggcatggtta

SEQ ID NO: 35387 - DNA, 21 bp, Homo sapiens
gatatctttaygtcatgactg

SEQ ID NO: 35388 - DNA, 21 bp, Homo sapiens
gggatattcamctgtgcatga

SEQ ID NO: 35389 - DNA, 21 bp, Homo sapiens
ccaaggactcygcactgaagc

SEQ ID NO: 35390 - DNA, 21 bp, Homo sapiens
ctccagagtcrcagtgctcag

SEQ ID NO: 35391 - DNA, 21 bp, Homo sapiens
cttccatcacrttcagtcagc

SEQ ID NO: 35392 - DNA, 21 bp, Homo sapiens
ataaacctgtstttaactgtt

SEQ ID NO: 35393 - DNA, 21 bp, Homo sapiens
acatccactcraaagctcacc

SEQ ID NO: 35394 - DNA, 21 bp, Homo sapiens
gtttatcttaygtggggttta

SEQ ID NO: 35395 - DNA, 21 bp, Homo sapiens
aggatgtgtgyattgacaagc

SEQ ID NO: 35396 - DNA, 21 bp, Homo sapiens
ttttgcagacscttctgctct

SEQ ID NO: 35397 - DNA, 21 bp, Homo sapiens
gggcctccccrcctgggatct

SEQ ID NO: 35398 - DNA, 21 bp, Homo sapiens
ggcagtaaagyaaaaaccaaa

SEQ ID NO: 35399 - DNA, 21 bp, Homo sapiens
cttgcattttycatcaggaat

SEQ ID NO: 35400 - DNA, 21 bp, Homo sapiens
aatctgtggaygtagggaatc

SEQ ID NO: 35401 - DNA, 21 bp, Homo sapiens
gacgtggcccrcactgcagtg

SEQ ID NO: 35402 - DNA, 21 bp, Homo sapiens
taactgctgtracagtggtgc

SEQ ID NO: 35403 - DNA, 21 bp, Homo sapiens
tactcagaacsaagaaaaatt

SEQ ID NO: 35404 - DNA, 21 bp, Homo sapiens
aagtctacaaygataagagtc

SEQ ID NO: 35405 - DNA, 21 bp, Homo sapiens
ttaacagcacmgggaacctac

SEQ ID NO: 35406 - DNA, 21 bp, Homo sapiens
taagagctctraagctctaaa

SEQ ID NO: 35407 - DNA, 21 bp, Homo sapiens
gatcccagatkttccttacga

SEQ ID NO: 35408 - DNA, 21 bp, Homo sapiens
cttccaagatwatttggagag

SEQ ID NO: 35409 - DNA, 21 bp, Homo sapiens
ctcagacagtwcaggtttatt

SEQ ID NO: 35410 - DNA, 21 bp, Homo sapiens
gcgtaaaacgmcccaaagcca

SEQ ID NO: 35411 - DNA, 21 bp, Homo sapiens
gtgcccaccaycatagcacag

SEQ ID NO: 35412 - DNA, 21 bp, Homo sapiens
ctggtgctccrgaaagcccac

SEQ ID NO: 35413 - DNA, 21 bp, Homo sapiens
aagaaaacctkacaagaagga

SEQ ID NO: 35414 - DNA, 21 bp, Homo sapiens
ggtttttacawacggccttta

SEQ ID NO: 35415 - DNA, 21 bp, Homo sapiens
gtttttccttyacaacatttt

SEQ ID NO: 35416 - DNA, 21 bp, Homo sapiens
gttcaaactgygctcaactaa

SEQ ID NO: 35417 - DNA, 21 bp, Homo sapiens
tttttgttttrtggtgggggt

SEQ ID NO: 35418 - DNA, 21 bp, Homo sapiens
tgtgtgtcccyttgagagaaa

SEQ ID NO: 35419 - DNA, 21 bp, Homo sapiens
acctgcaagartgatcaccca

SEQ ID NO: 35420 - DNA, 21 bp, Homo sapiens
tactgtatgayaaaagatatt

SEQ ID NO: 35421 - DNA, 21 bp, Homo sapiens
agcccatggayagcacatcca

SEQ ID NO: 35422 - DNA, 21 bp, Homo sapiens
ggacacatgaraaattagtag

SEQ ID NO: 35423 - DNA, 21 bp, Homo sapiens
gcagtgttcaytgaacaaata

SEQ ID NO: 35424 - DNA, 21 bp, Homo sapiens
tgaggatatcygagccaatga

SEQ ID NO: 35425 - DNA, 21 bp, Homo sapiens
agcctgttttygtggctgatc

SEQ ID NO: 35426 - DNA, 21 bp, Homo sapiens
atgtcttcacrtaaaaactag

SEQ ID NO: 35427 - DNA, 21 bp, Homo sapiens
tatctacacaygaaatctgca

SEQ ID NO: 35428 - DNA, 21 bp, Homo sapiens
aaacttctttktgaagtttgc

SEQ ID NO: 35429 - DNA, 21 bp, Homo sapiens
aaagatattgrggttcaaaga

SEQ ID NO: 35430 - DNA, 21 bp, Homo sapiens
ccacctcaagrcgtttgcaca

SEQ ID NO: 35431 - DNA, 21 bp, Homo sapiens
aggggtggggyagggtgagca

SEQ ID NO: 35432 - DNA, 21 bp, Homo sapiens
ttatttttttwaaaaaaaagg

SEQ ID NO: 35433 - DNA, 21 bp, Homo sapiens
aaggggctgcyaacagcagct

SEQ ID NO: 35434 - DNA, 21 bp, Homo sapiens
ccagcacttgrcccttggcct

SEQ ID NO: 35435 - DNA, 21 bp, Homo sapiens
catcactacaytagggacttt

SEQ ID NO: 35436 - DNA, 21 bp, Homo sapiens
gtccttaagargcgaatgggt

SEQ ID NO: 35437 - DNA, 21 bp, Homo sapiens
cttacatgtayctctttcccc

SEQ ID NO: 35438 - DNA, 21 bp, Homo sapiens
ttctgagtttygaaataaatg

SEQ ID NO: 35439 - DNA, 21 bp, Homo sapiens
gggaggtaggragtggccagt

SEQ ID NO: 35440 - DNA, 21 bp, Homo sapiens
gtgggtgctcrgcatcctgct

SEQ ID NO: 35441 - DNA, 21 bp, Homo sapiens
cagcagagatstcttcaaagg

SEQ ID NO: 35442 - DNA, 21 bp, Homo sapiens
tcaggaatgamgtacatatat

SEQ ID NO: 35443 - DNA, 21 bp, Homo sapiens
tcccttctaastttaaaattg

SEQ ID NO: 35444 - DNA, 21 bp, Homo sapiens
aagctctctgscccctagatt

SEQ ID NO: 35445 - DNA, 21 bp, Homo sapiens
tccctggcagmcttctaagtc

SEQ ID NO: 35446 - DNA, 21 bp, Homo sapiens
gttacctctgmagggtctcca

SEQ ID NO: 35447 - DNA, 21 bp, Homo sapiens
gactgtgtgtytctgctcaga

SEQ ID NO: 35448 - DNA, 21 bp, Homo sapiens
ataagcattasagttattttg

SEQ ID NO: 35449 - DNA, 21 bp, Homo sapiens
aaatgctcacygaataagctg

SEQ ID NO: 35450 - DNA, 21 bp, Homo sapiens
tcccaccccawctattccgta

SEQ ID NO: 35451 - DNA, 21 bp, Homo sapiens
ccctgcatatrtgttgaaaga

SEQ ID NO: 35452 - DNA, 21 bp, Homo sapiens
gattgagcagygacctgcatg

SEQ ID NO: 35453 - DNA, 21 bp, Homo sapiens
aaccaaccaawaaaaccctaa

SEQ ID NO: 35454 - DNA, 21 bp, Homo sapiens
ttgtgttctgragacagctga

SEQ ID NO: 35455 - DNA, 21 bp, Homo sapiens
ggactagggasttctgaatta

SEQ ID NO: 35456 - DNA, 21 bp, Homo sapiens
tttgcttcagytcctctgctg

SEQ ID NO: 35457 - DNA, 21 bp, Homo sapiens
atcctgcagayattcagcctc

SEQ ID NO: 35458 - DNA, 21 bp, Homo sapiens
ccataactcargtaatccttt

SEQ ID NO: 35459 - DNA, 21 bp, Homo sapiens
tccattttggkgaaagatgat

SEQ ID NO: 35460 - DNA, 21 bp, Homo sapiens
tatggcctcaytttgactaag

SEQ ID NO: 35461 - DNA, 21 bp, Homo sapiens
tcgctggcacrtgctagacag

SEQ ID NO: 35462 - DNA, 21 bp, Homo sapiens
aatgggttgayggatggaagc

SEQ ID NO: 35463 - DNA, 21 bp, Homo sapiens
ctccttgtaaytttccaatgc

SEQ ID NO: 35464 - DNA, 21 bp, Homo sapiens
ggcggcaggcratgtgaaggc

SEQ ID NO: 35465 - DNA, 21 bp, Homo sapiens
aagctcagagyctcaggcata

SEQ ID NO: 35466 - DNA, 21 bp, Homo sapiens
aacagtgttgyttttccaagg

SEQ ID NO: 35467 - DNA, 21 bp, Homo sapiens
ccatggcagcrgttacatggg

SEQ ID NO: 35468 - DNA, 21 bp, Homo sapiens
ggcaagagccrcagaggtatg

SEQ ID NO: 35469 - DNA, 21 bp, Homo sapiens
ctcttgagtckgcattaatga

SEQ ID NO: 35470 - DNA, 21 bp, Homo sapiens
ggcagcttctrcacacacctc

SEQ ID NO: 35471 - DNA, 21 bp, Homo sapiens
gacaagacacygaggcctgga

SEQ ID NO: 35472 - DNA, 21 bp, Homo sapiens
gatcacaagtmcttcaaatcc

SEQ ID NO: 35473 - DNA, 21 bp, Homo sapiens
agtgccctccygcaaatacac

SEQ ID NO: 35474 - DNA, 21 bp, Homo sapiens
caccccaagaygtctccattt

SEQ ID NO: 35475 - DNA, 21 bp, Homo sapiens
attagctccayacatagggtc

SEQ ID NO: 35476 - DNA, 21 bp, Homo sapiens
cagatctgccmctggggatga

SEQ ID NO: 35477 - DNA, 21 bp, Homo sapiens
aagccatggargaataatgac

SEQ ID NO: 35478 - DNA, 21 bp, Homo sapiens
aggtgtgtggmtgggtctaag

SEQ ID NO: 35479 - DNA, 21 bp, Homo sapiens
acctcgctacrtatgaaaaac

SEQ ID NO: 35480 - DNA, 21 bp, Homo sapiens
gtctgcaatcrataactttaa

SEQ ID NO: 35481 - DNA, 21 bp, Homo sapiens
aatacaccacwggaaagcata

SEQ ID NO: 35482 - DNA, 21 bp, Homo sapiens
ctcaacattaktcatttcttc

SEQ ID NO: 35483 - DNA, 21 bp, Homo sapiens
ctattactgayctacgattat

SEQ ID NO: 35484 - DNA, 21 bp, Homo sapiens
tgctgtgttcrcaggaagctg

SEQ ID NO: 35485 - DNA, 21 bp, Homo sapiens
cctctctggcrttggtattac

SEQ ID NO: 35486 - DNA, 21 bp, Homo sapiens
tagattccccrtcctccaata

SEQ ID NO: 35487 - DNA, 21 bp, Homo sapiens
atatttagatkagctggagaa

SEQ ID NO: 35488 - DNA, 21 bp, Homo sapiens
cttcatctttrtggtacatac

SEQ ID NO: 35489 - DNA, 21 bp, Homo sapiens
atatcctaatygtctgtcttg

SEQ ID NO: 35490 - DNA, 21 bp, Homo sapiens
gtagttagttyatcttgatgg

SEQ ID NO: 35491 - DNA, 21 bp, Homo sapiens
aaccgtaaagkctcaaagtta

SEQ ID NO: 35492 - DNA, 21 bp, Homo sapiens
ggggtagggarctctctgccc

SEQ ID NO: 35493 - DNA, 21 bp, Homo sapiens
tatctaaatgmgaataatacc

SEQ ID NO: 35494 - DNA, 21 bp, Homo sapiens
gaaatcacatmaaccttagca

SEQ ID NO: 35495 - DNA, 21 bp, Homo sapiens
actccgccagyagcatgccac

SEQ ID NO: 35496 - DNA, 21 bp, Homo sapiens
gggtaaattastgttgctgct

SEQ ID NO: 35497 - DNA, 21 bp, Homo sapiens
tctatatcaasgttttccccc

SEQ ID NO: 35498 - DNA, 21 bp, Homo sapiens
gccttgcttartatacgcata

SEQ ID NO: 35499 - DNA, 21 bp, Homo sapiens
atagcttgaaycagattggta

SEQ ID NO: 35500 - DNA, 21 bp, Homo sapiens
tccgaagtaaytgagatcaca

SEQ ID NO: 35501 - DNA, 21 bp, Homo sapiens
cttctctagaktaccatttca

SEQ ID NO: 35502 - DNA, 21 bp, Homo sapiens
ttgttttctartggatagcca

SEQ ID NO: 35503 - DNA, 21 bp, Homo sapiens
ccaagttcacrttgtctgtgc

SEQ ID NO: 35504 - DNA, 21 bp, Homo sapiens
tggtgggcttrgaaatgatgg

SEQ ID NO: 35505 - DNA, 21 bp, Homo sapiens
aataactgagrtgagacatga

SEQ ID NO: 35506 - DNA, 21 bp, Homo sapiens
cagcattcttygtggtcatgt

SEQ ID NO: 35507 - DNA, 21 bp, Homo sapiens
ttttcagttcsgtgtttgcaa

SEQ ID NO: 35508 - DNA, 21 bp, Homo sapiens
atttagaatasatttaaaagg

SEQ ID NO: 35509 - DNA, 21 bp, Homo sapiens
gacgaatggayggaaggaagg

SEQ ID NO: 35510 - DNA, 21 bp, Homo sapiens
aatcattaacmaattattttg

SEQ ID NO: 35511 - DNA, 21 bp, Homo sapiens
tgcccattttmaaaatcaatc

SEQ ID NO: 35512 - DNA, 21 bp, Homo sapiens
taactttatcwtaagaataca

SEQ ID NO: 35513 - DNA, 21 bp, Homo sapiens
accagaaatcygggattattt

SEQ ID NO: 35514 - DNA, 21 bp, Homo sapiens
tgtagtcttgytaaaaacttc

SEQ ID NO: 35515 - DNA, 21 bp, Homo sapiens
agccataaaaygtcaaaatga

SEQ ID NO: 35516 - DNA, 21 bp, Homo sapiens
tctagggctgsggtgggaagg

SEQ ID NO: 35517 - DNA, 21 bp, Homo sapiens
taattactgcraacttcagaa

SEQ ID NO: 35518 - DNA, 21 bp, Homo sapiens
cactctgaaargtgctcaaag

SEQ ID NO: 35519 - DNA, 21 bp, Homo sapiens
tcaaccactakgagaaagtag

SEQ ID NO: 35520 - DNA, 21 bp, Homo sapiens
tccatatgtgrtctatgaggt

SEQ ID NO: 35521 - DNA, 21 bp, Homo sapiens
tagattccatytctagtaact

SEQ ID NO: 35522 - DNA, 21 bp, Homo sapiens
taacttcaatytgtgaaagcc

SEQ ID NO: 35523 - DNA, 21 bp, Homo sapiens
acagtaaatcrttattaaaca

SEQ ID NO: 35524 - DNA, 21 bp, Homo sapiens
aggatactagrgcattatatg

SEQ ID NO: 35525 - DNA, 21 bp, Homo sapiens
tccatgtacargttaccatag

SEQ ID NO: 35526 - DNA, 21 bp, Homo sapiens
aaatgtgccarccataccttt

SEQ ID NO: 35527 - DNA, 21 bp, Homo sapiens
gccagttcgaragagatttca

SEQ ID NO: 35528 - DNA, 21 bp, Homo sapiens
taggtgacgaycctcaaaaga

SEQ ID NO: 35529 - DNA, 21 bp, Homo sapiens
gactctatatrtcagtaagaa

SEQ ID NO: 35530 - DNA, 21 bp, Homo sapiens
acatgttttayatggattagt

SEQ ID NO: 35531 - DNA, 21 bp, Homo sapiens
ctgtagctaawgaaatgaatt

SEQ ID NO: 35532 - DNA, 21 bp, Homo sapiens
caatactttcraatgtaatct

SEQ ID NO: 35533 - DNA, 21 bp, Homo sapiens
actcaataaarggcaatatgt

SEQ ID NO: 35534 - DNA, 21 bp, Homo sapiens
caacctagcaytagggtatct

SEQ ID NO: 35535 - DNA, 21 bp, Homo sapiens
atgatagcacrtggagcataa

SEQ ID NO: 35536 - DNA, 21 bp, Homo sapiens
tagccagcacmctgggacagt

SEQ ID NO: 35537 - DNA, 21 bp, Homo sapiens
tatatgttgcrgcccctttct

SEQ ID NO: 35538 - DNA, 21 bp, Homo sapiens
cttaatttgtrccaaagataa

SEQ ID NO: 35539 - DNA, 21 bp, Homo sapiens
agccctgactkttattaaaac

SEQ ID NO: 35540 - DNA, 21 bp, Homo sapiens
ttttttcagasagaggtgttg

SEQ ID NO: 35541 - DNA, 21 bp, Homo sapiens
gaagcctgatwtaattgtagt

SEQ ID NO: 35542 - DNA, 21 bp, Homo sapiens
gggagtgacargttgtggcta

SEQ ID NO: 35543 - DNA, 21 bp, Homo sapiens
aatatactacyagaagccaat

SEQ ID NO: 35544 - DNA, 21 bp, Homo sapiens
tcacagaataktcaagggcag

SEQ ID NO: 35545 - DNA, 21 bp, Homo sapiens
attccactggycccatatgag

SEQ ID NO: 35546 - DNA, 21 bp, Homo sapiens
aatccaattgrtaaaagctct

SEQ ID NO: 35547 - DNA, 21 bp, Homo sapiens
tgacattaatrttgttggaaa

SEQ ID NO: 35548 - DNA, 21 bp, Homo sapiens
cgcatgccttrtgctgaagaa

SEQ ID NO: 35549 - DNA, 21 bp, Homo sapiens
tttgtgctggytccattttct

SEQ ID NO: 35550 - DNA, 21 bp, Homo sapiens
agatgcatgtrtcattctgtc

SEQ ID NO: 35551 - DNA, 21 bp, Homo sapiens
ctgctgccacrcagagggtga

SEQ ID NO: 35552 - DNA, 21 bp, Homo sapiens
gtgaacaggtrttgaaggcac

SEQ ID NO: 35553 - DNA, 21 bp, Homo sapiens
catatggtcartcttggagaa

SEQ ID NO: 35554 - DNA, 21 bp, Homo sapiens
tccctggccaygctttcacct

SEQ ID NO: 35555 - DNA, 21 bp, Homo sapiens
ttttaaattayggttatgaat

SEQ ID NO: 35556 - DNA, 21 bp, Homo sapiens
tatgtgtctayatactatact

SEQ ID NO: 35557 - DNA, 21 bp, Homo sapiens
tggttttacaycacttatttt

SEQ ID NO: 35558 - DNA, 21 bp, Homo sapiens
tatgaacagaytggcatggta

SEQ ID NO: 35559 - DNA, 21 bp, Homo sapiens
agcagtgtgtrccactttaac

SEQ ID NO: 35560 - DNA, 21 bp, Homo sapiens
atcatatagarccaaaaaaaa

SEQ ID NO: 35561 - DNA, 21 bp, Homo sapiens
gtatataaaayagaaaccttc

SEQ ID NO: 35562 - DNA, 21 bp, Homo sapiens
ataggtagaayatgcataggg

SEQ ID NO: 35563 - DNA, 21 bp, Homo sapiens
aagaggcaacygtgagaagga

SEQ ID NO: 35564 - DNA, 21 bp, Homo sapiens
taaagtttccrtttttcctat

SEQ ID NO: 35565 - DNA, 21 bp, Homo sapiens
gagaaaaggastccatcttat

SEQ ID NO: 35566 - DNA, 21 bp, Homo sapiens
gaagacctaaycctgttacag

SEQ ID NO: 35567 - DNA, 21 bp, Homo sapiens
ggaggtgttcrttttctgaaa

SEQ ID NO: 35568 - DNA, 21 bp, Homo sapiens
attctgtagaygtccttgcat

SEQ ID NO: 35569 - DNA, 21 bp, Homo sapiens
gctctgctgcrgaagctgaag

SEQ ID NO: 35570 - DNA, 21 bp, Homo sapiens
cttcagtgccrggctcagtgg

SEQ ID NO: 35571 - DNA, 21 bp, Homo sapiens
aatgaaacacwcagtcatgct

SEQ ID NO: 35572 - DNA, 21 bp, Homo sapiens
taatatcgttrgtgaccaggc

SEQ ID NO: 35573 - DNA, 21 bp, Homo sapiens
gagttcccccrtttctagagg

SEQ ID NO: 35574 - DNA, 21 bp, Homo sapiens
tttgattcttytcacttttct

SEQ ID NO: 35575 - DNA, 21 bp, Homo sapiens
cttttagttgyggtgttaggt

SEQ ID NO: 35576 - DNA, 21 bp, Homo sapiens
ccctactcctmttttccaacc

SEQ ID NO: 35577 - DNA, 21 bp, Homo sapiens
gaggcagcccygcaccttccc

SEQ ID NO: 35578 - DNA, 21 bp, Homo sapiens
cagctgtgtayccttctgaca

SEQ ID NO: 35579 - DNA, 21 bp, Homo sapiens
ggactctgccstgcacgggcc

SEQ ID NO: 35580 - DNA, 21 bp, Homo sapiens
gaacacccatyatgcttgtaa

SEQ ID NO: 35581 - DNA, 21 bp, Homo sapiens
aaccagctgcyctggaatgtt

SEQ ID NO: 35582 - DNA, 21 bp, Homo sapiens
tttcaatgcakttttttctga

SEQ ID NO: 35583 - DNA, 21 bp, Homo sapiens
caatgtctggyttatatagtg

SEQ ID NO: 35584 - DNA, 21 bp, Homo sapiens
gatccagggcstgctctactc

SEQ ID NO: 35585 - DNA, 21 bp, Homo sapiens
gtgacaggaaygcagtgttga

SEQ ID NO: 35586 - DNA, 21 bp, Homo sapiens
gatggtgcctkgtaaatgcct

SEQ ID NO: 35587 - DNA, 21 bp, Homo sapiens
ccctgtggctyctttcgcctg

SEQ ID NO: 35588 - DNA, 21 bp, Homo sapiens
gcgtcacctgrtagcgataga

SEQ ID NO: 35589 - DNA, 21 bp, Homo sapiens
accagggtccscacctagcct

SEQ ID NO: 35590 - DNA, 21 bp, Homo sapiens
gcaggttttgrtgtctgtttg

SEQ ID NO: 35591 - DNA, 21 bp, Homo sapiens
tgaagctgtcrgcaccaccca

SEQ ID NO: 35592 - DNA, 21 bp, Homo sapiens
tcccctcccayggggaatcta

SEQ ID NO: 35593 - DNA, 21 bp, Homo sapiens
tattctagcarttctcttttt

SEQ ID NO: 35594 - DNA, 21 bp, Homo sapiens
tcagagatggrgaggggcggc

SEQ ID NO: 35595 - DNA, 21 bp, Homo sapiens
gggagagcaarggctccagac

SEQ ID NO: 35596 - DNA, 21 bp, Homo sapiens
ataacactggygatcatggga

SEQ ID NO: 35597 - DNA, 21 bp, Homo sapiens
gtactattctsggtgggagga

SEQ ID NO: 35598 - DNA, 21 bp, Homo sapiens
tcagttttccytgcctgggaa

SEQ ID NO: 35599 - DNA, 21 bp, Homo sapiens
ccctctgtccygggaaccctc

SEQ ID NO: 35600 - DNA, 21 bp, Homo sapiens
catccacctgsggctgagggg

SEQ ID NO: 35601 - DNA, 21 bp, Homo sapiens
ctacgcactcygtggatccag

SEQ ID NO: 35602 - DNA, 21 bp, Homo sapiens
agcgttgggcwtttcccccgc

SEQ ID NO: 35603 - DNA, 21 bp, Homo sapiens
ctccgccctgktctccctgtt

SEQ ID NO: 35604 - DNA, 21 bp, Homo sapiens
ccacccaagcygcatttctaa

SEQ ID NO: 35605 - DNA, 21 bp, Homo sapiens
aaatacagaarctacgaggca

SEQ ID NO: 35606 - DNA, 21 bp, Homo sapiens
aagagtgacayggctgactct

SEQ ID NO: 35607 - DNA, 21 bp, Homo sapiens
ctccaccatasggatctcaca

SEQ ID NO: 35608 - DNA, 21 bp, Homo sapiens
gagctgatacrgagttgctag

SEQ ID NO: 35609 - DNA, 21 bp, Homo sapiens
aacctcatctwgtttttgttt

SEQ ID NO: 35610 - DNA, 21 bp, Homo sapiens
cacccgcttcsccctcaaacc

SEQ ID NO: 35611 - DNA, 21 bp, Homo sapiens
ccacactctcmccaagccctg

SEQ ID NO: 35612 - DNA, 21 bp, Homo sapiens
ggtccccacamggcacccact

SEQ ID NO: 35613 - DNA, 21 bp, Homo sapiens
taatgtttaayttataaatta

SEQ ID NO: 35614 - DNA, 21 bp, Homo sapiens
taccactggasggtgttatac

SEQ ID NO: 35615 - DNA, 21 bp, Homo sapiens
cctgtgagtgsagcagaaagt

SEQ ID NO: 35616 - DNA, 21 bp, Homo sapiens
aatccttgatrtttaaaagga

SEQ ID NO: 35617 - DNA, 21 bp, Homo sapiens
accaacctggyctctggcccc

SEQ ID NO: 35618 - DNA, 21 bp, Homo sapiens
agtagaatttsaacttcaaag

SEQ ID NO: 35619 - DNA, 21 bp, Homo sapiens
cacagcaaccrtggaagttca

SEQ ID NO: 35620 - DNA, 21 bp, Homo sapiens
aaagtgctagrattacatatt

SEQ ID NO: 35621 - DNA, 21 bp, Homo sapiens
gatctggttcrgagctctggg

SEQ ID NO: 35622 - DNA, 21 bp, Homo sapiens
gaggcccagarggggtcagta

SEQ ID NO: 35623 - DNA, 21 bp, Homo sapiens
ggtctaggcgkgcggaagcgg

SEQ ID NO: 35624 - DNA, 21 bp, Homo sapiens
gatatttatgsccattacttt

SEQ ID NO: 35625 - DNA, 21 bp, Homo sapiens
tgaagagtggkctgaagaagc

SEQ ID NO: 35626 - DNA, 21 bp, Homo sapiens
ctggaagtctyccagcaggac

SEQ ID NO: 35627 - DNA, 21 bp, Homo sapiens
cagggaagagragagcagtgg

SEQ ID NO: 35628 - DNA, 21 bp, Homo sapiens
gttccctaacsggttggtgtt

SEQ ID NO: 35629 - DNA, 21 bp, Homo sapiens
gaagtaccgcyaacattgacc

SEQ ID NO: 35630 - DNA, 21 bp, Homo sapiens
gtggtggggargagccttgtc

SEQ ID NO: 35631 - DNA, 21 bp, Homo sapiens
caccagctcaygtcatcctgg

SEQ ID NO: 35632 - DNA, 21 bp, Homo sapiens
ccaggctgctsattggctgag

SEQ ID NO: 35633 - DNA, 21 bp, Homo sapiens
ttgtggggggyggtggggtcc

SEQ ID NO: 35634 - DNA, 21 bp, Homo sapiens
atggaaaataygggttgcgaa

SEQ ID NO: 35635 - DNA, 21 bp, Homo sapiens
tttttattaayttattttgtt

SEQ ID NO: 35636 - DNA, 21 bp, Homo sapiens
acagttttttrctaatgtcct

SEQ ID NO: 35637 - DNA, 21 bp, Homo sapiens
agtgaacaggkgtcatatgct

SEQ ID NO: 35638 - DNA, 21 bp, Homo sapiens
gagttttttgktttttgtttt

SEQ ID NO: 35639 - DNA, 21 bp, Homo sapiens
ttaagcccagytcaaatacat

SEQ ID NO: 35640 - DNA, 21 bp, Homo sapiens
gtttgctgccrgaagacacat

SEQ ID NO: 35641 - DNA, 21 bp, Homo sapiens
tccagtgtcgyctaagtgagg

SEQ ID NO: 35642 - DNA, 21 bp, Homo sapiens
tctacacattrgtgtaccctg

SEQ ID NO: 35643 - DNA, 21 bp, Homo sapiens
cttttctgaayatttcatata

SEQ ID NO: 35644 - DNA, 21 bp, Homo sapiens
gattcttaaakggccagttcc

SEQ ID NO: 35645 - DNA, 21 bp, Homo sapiens
gatgtcagatrtgatggcttt

SEQ ID NO: 35646 - DNA, 21 bp, Homo sapiens
catgatcatgkaataattttg

SEQ ID NO: 35647 - DNA, 21 bp, Homo sapiens
acacaaccccytgtttctccc

SEQ ID NO: 35648 - DNA, 21 bp, Homo sapiens
aagatgactcytgggagccag

SEQ ID NO: 35649 - DNA, 21 bp, Homo sapiens
gaatgccaatragtgtgactg

SEQ ID NO: 35650 - DNA, 21 bp, Homo sapiens
tgctcctcaaracagaattca

SEQ ID NO: 35651 - DNA, 21 bp, Homo sapiens
ataattgagtkttgaagaaag

SEQ ID NO: 35652 - DNA, 21 bp, Homo sapiens
atacatttttycagaatacat

SEQ ID NO: 35653 - DNA, 21 bp, Homo sapiens
cttacggggtkgctgtgaaaa

SEQ ID NO: 35654 - DNA, 21 bp, Homo sapiens
gtgtggagtgrcccactttca

SEQ ID NO: 35655 - DNA, 21 bp, Homo sapiens
tagaaagaaargaatgtctgc

SEQ ID NO: 35656 - DNA, 21 bp, Homo sapiens
caaaacaaaayattatgacaa

SEQ ID NO: 35657 - DNA, 21 bp, Homo sapiens
gaaataggaamatcctattgc

SEQ ID NO: 35658 - DNA, 21 bp, Homo sapiens
tcagtgtaaayagcgtataca

SEQ ID NO: 35659 - DNA, 21 bp, Homo sapiens
aaaatccccayaatcacaatc

SEQ ID NO: 35660 - DNA, 21 bp, Homo sapiens
ttttctcaaartctgtaagag

SEQ ID NO: 35661 - DNA, 21 bp, Homo sapiens
ggggagagggyaggttaattt

SEQ ID NO: 35662 - DNA, 21 bp, Homo sapiens
ttctttatggmagaatctttt

SEQ ID NO: 35663 - DNA, 21 bp, Homo sapiens
tgctattctgygattcagact

SEQ ID NO: 35664 - DNA, 21 bp, Homo sapiens
acccgttagayacgatgtgtt

SEQ ID NO: 35665 - DNA, 21 bp, Homo sapiens
ggtagaaattytaaaaccaca

SEQ ID NO: 35666 - DNA, 21 bp, Homo sapiens
tatattttttyccccacatga

SEQ ID NO: 35667 - DNA, 21 bp, Homo sapiens
ttctctataarttaatcgtga

SEQ ID NO: 35668 - DNA, 21 bp, Homo sapiens
tatttttaatsactttgtgtg

SEQ ID NO: 35669 - DNA, 21 bp, Homo sapiens
ggacttaggarggaagactag

SEQ ID NO: 35670 - DNA, 21 bp, Homo sapiens
aatgagcattmttcctcccca

SEQ ID NO: 35671 - DNA, 21 bp, Homo sapiens
gttgtttgatkctgctgtgct

SEQ ID NO: 35672 - DNA, 21 bp, Homo sapiens
tgacagaagasgcggtgccag

SEQ ID NO: 35673 - DNA, 21 bp, Homo sapiens
atttaggccgrgccagtaatt

SEQ ID NO: 35674 - DNA, 21 bp, Homo sapiens
tggacctcatygagtcaactc

SEQ ID NO: 35675 - DNA, 21 bp, Homo sapiens
ctaaaacaacyaccatttatt

SEQ ID NO: 35676 - DNA, 21 bp, Homo sapiens
cattttctttyctctattttt

SEQ ID NO: 35677 - DNA, 21 bp, Homo sapiens
cagccccaagrtggatcagga

SEQ ID NO: 35678 - DNA, 21 bp, Homo sapiens
tgccaggaacrgctgtcccgc

SEQ ID NO: 35679 - DNA, 21 bp, Homo sapiens
tgaaagggacyccttgaaggt

SEQ ID NO: 35680 - DNA, 21 bp, Homo sapiens
tgattgctctyacgcaccctg

SEQ ID NO: 35681 - DNA, 21 bp, Homo sapiens
tgacctcaccrttctggtttt

SEQ ID NO: 35682 - DNA, 21 bp, Homo sapiens
caaaatgtgcyagaaagcaga

SEQ ID NO: 35683 - DNA, 21 bp, Homo sapiens
caagagtgcayccagaagccc

SEQ ID NO: 35684 - DNA, 21 bp, Homo sapiens
attagatacasgtcctgcccg

SEQ ID NO: 35685 - DNA, 21 bp, Homo sapiens
atcaagtctgrtatgttctct

SEQ ID NO: 35686 - DNA, 21 bp, Homo sapiens
cctatgtcccycatagttact

SEQ ID NO: 35687 - DNA, 21 bp, Homo sapiens
agtagcacatsctggttagat

SEQ ID NO: 35688 - DNA, 21 bp, Homo sapiens
ctcaaaaattwaaaaaaaaaa

SEQ ID NO: 35689 - DNA, 21 bp, Homo sapiens
tttgagctgtrttatttagac

SEQ ID NO: 35690 - DNA, 21 bp, Homo sapiens
tcaacaaatcyatagagaaag

SEQ ID NO: 35691 - DNA, 21 bp, Homo sapiens
ccaggtaaatytctaaggttt

SEQ ID NO: 35692 - DNA, 21 bp, Homo sapiens
agtccaccccytacctttggc

SEQ ID NO: 35693 - DNA, 21 bp, Homo sapiens
aacaggaagcracactttcca

SEQ ID NO: 35694 - DNA, 21 bp, Homo sapiens
ggccttgtctratgttgatat

SEQ ID NO: 35695 - DNA, 21 bp, Homo sapiens
aacttgtttayccaaggtgat

SEQ ID NO: 35696 - DNA, 21 bp, Homo sapiens
aggggcacgtrcattcttcat

SEQ ID NO: 35697 - DNA, 21 bp, Homo sapiens
ttttttttaartagacatcac

SEQ ID NO: 35698 - DNA, 21 bp, Homo sapiens
aagttgctatrtgtaacaatg

SEQ ID NO: 35699 - DNA, 21 bp, Homo sapiens
ataaggcatgrtttctgctct

SEQ ID NO: 35700 - DNA, 21 bp, Homo sapiens
gattaatatgytgaagcccta

SEQ ID NO: 35701 - DNA, 21 bp, Homo sapiens
ttccatccttrgaatgtaacg

SEQ ID NO: 35702 - DNA, 21 bp, Homo sapiens
aggaaaacccrcctgtgcaga

SEQ ID NO: 35703 - DNA, 21 bp, Homo sapiens
acccaccataygtttgccttt

SEQ ID NO: 35704 - DNA, 21 bp, Homo sapiens
ccaaaaggaaygaacaaaaca

SEQ ID NO: 35705 - DNA, 21 bp, Homo sapiens
tatcataatarcctgtattct

SEQ ID NO: 35706 - DNA, 21 bp, Homo sapiens
ctttacataargtggtaaaat

SEQ ID NO: 35707 - DNA, 21 bp, Homo sapiens
gtgcctcattyttaatggcca

SEQ ID NO: 35708 - DNA, 21 bp, Homo sapiens
aaatatatggsacctcatggc

SEQ ID NO: 35709 - DNA, 21 bp, Homo sapiens
cccagcaaagrggacagtcaa

SEQ ID NO: 35710 - DNA, 21 bp, Homo sapiens
aatattctctwaaggcccaag

SEQ ID NO: 35711 - DNA, 21 bp, Homo sapiens
tctaagatatytttatgacat

SEQ ID NO: 35712 - DNA, 21 bp, Homo sapiens
aagtaataccmtttttggcag

SEQ ID NO: 35713 - DNA, 21 bp, Homo sapiens
tctcccctaayccctagagag

SEQ ID NO: 35714 - DNA, 21 bp, Homo sapiens
tattccttctycttttccttt

SEQ ID NO: 35715 - DNA, 21 bp, Homo sapiens
agtatcatcgkggtactgtgc

SEQ ID NO: 35716 - DNA, 21 bp, Homo sapiens
actattttgtrataacacttg

SEQ ID NO: 35717 - DNA, 21 bp, Homo sapiens
agaaaatactkaggacttcag

SEQ ID NO: 35718 - DNA, 21 bp, Homo sapiens
gatgacaaaaytaatgccatg

SEQ ID NO: 35719 - DNA, 21 bp, Homo sapiens
taaatccatargcaaaaaaca

SEQ ID NO: 35720 - DNA, 21 bp, Homo sapiens
ggtgattaaaraatgaatgtt

SEQ ID NO: 35721 - DNA, 21 bp, Homo sapiens
agtatgttctyccatcacaat

SEQ ID NO: 35722 - DNA, 21 bp, Homo sapiens
ccttgctttarctgcatacta

SEQ ID NO: 35723 - DNA, 21 bp, Homo sapiens
ttgtagcatcktttgttctct

SEQ ID NO: 35724 - DNA, 21 bp, Homo sapiens
aattactaaawtattttttaa

SEQ ID NO: 35725 - DNA, 21 bp, Homo sapiens
agaagtagtarcagcaattcc

SEQ ID NO: 35726 - DNA, 21 bp, Homo sapiens
aagtaggttaytggatcaatt

SEQ ID NO: 35727 - DNA, 21 bp, Homo sapiens
tcttgctagaygaagaagtta

SEQ ID NO: 35728 - DNA, 21 bp, Homo sapiens
accaatttaartgtaaagata

SEQ ID NO: 35729 - DNA, 21 bp, Homo sapiens
taaaatagttyaatattgttg

SEQ ID NO: 35730 - DNA, 21 bp, Homo sapiens
ggacaacataygcagctgaac

SEQ ID NO: 35731 - DNA, 21 bp, Homo sapiens
tgcttgtacarttttccttga

SEQ ID NO: 35732 - DNA, 21 bp, Homo sapiens
cagctctgggrggagaggaaa

SEQ ID NO: 35733 - DNA, 21 bp, Homo sapiens
cttctcaaagktttattttct

SEQ ID NO: 35734 - DNA, 21 bp, Homo sapiens
aaaaaagaaamaagttgatac

SEQ ID NO: 35735 - DNA, 21 bp, Homo sapiens
gagtgggtackcggggatggt

SEQ ID NO: 35736 - DNA, 21 bp, Homo sapiens
tcatttttttwaaaaattatc

SEQ ID NO: 35737 - DNA, 21 bp, Homo sapiens
tgtatgaattwtatagatatt

SEQ ID NO: 35738 - DNA, 21 bp, Homo sapiens
aatgtttgacyggttaaccaa

SEQ ID NO: 35739 - DNA, 21 bp, Homo sapiens
ccagtcactgygctctactac

SEQ ID NO: 35740 - DNA, 21 bp, Homo sapiens
gtcttcatcartgagttcttg

SEQ ID NO: 35741 - DNA, 21 bp, Homo sapiens
cattttttacycccattgggt

SEQ ID NO: 35742 - DNA, 21 bp, Homo sapiens
tcagttgtttragggcttctc

SEQ ID NO: 35743 - DNA, 21 bp, Homo sapiens
tggaaagcaayagaagttttg

SEQ ID NO: 35744 - DNA, 21 bp, Homo sapiens
tagaaacagcrcaaggtcaga

SEQ ID NO: 35745 - DNA, 21 bp, Homo sapiens
gcagagtggcracattaggaa

SEQ ID NO: 35746 - DNA, 21 bp, Homo sapiens
taaattgaacytcaaaatagg

SEQ ID NO: 35747 - DNA, 21 bp, Homo sapiens
taatacatgtrcatgaaatgg

SEQ ID NO: 35748 - DNA, 21 bp, Homo sapiens
aatttctagtyctctgcccca

SEQ ID NO: 35749 - DNA, 21 bp, Homo sapiens
taaaattcagsactgccagga

SEQ ID NO: 35750 - DNA, 21 bp, Homo sapiens
atgtatctcayaacgagcttt

SEQ ID NO: 35751 - DNA, 21 bp, Homo sapiens
attaaaaatgrcactgggaca

SEQ ID NO: 35752 - DNA, 21 bp, Homo sapiens
agccaatttgrtgttaaaaaa

SEQ ID NO: 35753 - DNA, 21 bp, Homo sapiens
tggtccctcaracgtaaaata

SEQ ID NO: 35754 - DNA, 21 bp, Homo sapiens
gcttgcccgcygaggtcagca

SEQ ID NO: 35755 - DNA, 21 bp, Homo sapiens
ccccttcccasagactgcatt

SEQ ID NO: 35756 - DNA, 21 bp, Homo sapiens
aaagatagttktgaaaggatt

SEQ ID NO: 35757 - DNA, 21 bp, Homo sapiens
gatatgtaaaktgctaagagt

SEQ ID NO: 35758 - DNA, 21 bp, Homo sapiens
aggtaaaccaygaaatagcca

SEQ ID NO: 35759 - DNA, 21 bp, Homo sapiens
cttgttatccrtggtaaagaa

SEQ ID NO: 35760 - DNA, 21 bp, Homo sapiens
aaagaagagaraaaaaggaat

SEQ ID NO: 35761 - DNA, 21 bp, Homo sapiens
aactgttttamacacatctat

SEQ ID NO: 35762 - DNA, 21 bp, Homo sapiens
ccaagatgaaraacacaaaac

SEQ ID NO: 35763 - DNA, 21 bp, Homo sapiens
caaacagatcygatttcagat

SEQ ID NO: 35764 - DNA, 21 bp, Homo sapiens
ctccagacaaraagcaaaagc

SEQ ID NO: 35765 - DNA, 21 bp, Homo sapiens
ggtcatacagrcacaatggtg

SEQ ID NO: 35766 - DNA, 21 bp, Homo sapiens
caagccaaaartgaaaagtgg

SEQ ID NO: 35767 - DNA, 21 bp, Homo sapiens
aggtcatcagygtcctttctc

SEQ ID NO: 35768 - DNA, 21 bp, Homo sapiens
aatattagtarggaactgcaa

SEQ ID NO: 35769 - DNA, 21 bp, Homo sapiens
gtaatcatttyttttattatc

SEQ ID NO: 35770 - DNA, 21 bp, Homo sapiens
ttggggagggrtgactgcaaa

SEQ ID NO: 35771 - DNA, 21 bp, Homo sapiens
cttcatagcayttagattaca

SEQ ID NO: 35772 - DNA, 21 bp, Homo sapiens
gcaaatgttgyatggaagcct

SEQ ID NO: 35773 - DNA, 21 bp, Homo sapiens
ctgaggatgaytaaacaattc

SEQ ID NO: 35774 - DNA, 21 bp, Homo sapiens
tgctggagttytctttcaaac

SEQ ID NO: 35775 - DNA, 21 bp, Homo sapiens
aagggaggctrtgcacatatg

SEQ ID NO: 35776 - DNA, 21 bp, Homo sapiens
agtaaacaaaytagcagagct

SEQ ID NO: 35777 - DNA, 21 bp, Homo sapiens
ctaagatctayctctcaaggt

SEQ ID NO: 35778 - DNA, 21 bp, Homo sapiens
atagaaagcakacagttacta

SEQ ID NO: 35779 - DNA, 21 bp, Homo sapiens
gggaacaaacrgtatgttgcc

SEQ ID NO: 35780 - DNA, 21 bp, Homo sapiens
tcaaacttgayagctatttgt

SEQ ID NO: 35781 - DNA, 21 bp, Homo sapiens
attcctagctkgttattcgta

SEQ ID NO: 35782 - DNA, 21 bp, Homo sapiens
tttctgaaccygtttccatga

SEQ ID NO: 35783 - DNA, 21 bp, Homo sapiens
ctaaccttatytttacaaaga

SEQ ID NO: 35784 - DNA, 21 bp, Homo sapiens
taggaagggtratacctgatg

SEQ ID NO: 35785 - DNA, 21 bp, Homo sapiens
ggaaacattayatgtcattat

SEQ ID NO: 35786 - DNA, 21 bp, Homo sapiens
cagggtgcccycttgatgtgg

SEQ ID NO: 35787 - DNA, 21 bp, Homo sapiens
tttgttttccrgtattccttt

SEQ ID NO: 35788 - DNA, 21 bp, Homo sapiens
atgacaagccmaatcataatg

SEQ ID NO: 35789 - DNA, 21 bp, Homo sapiens
aaagagaagamagaatgttta

SEQ ID NO: 35790 - DNA, 21 bp, Homo sapiens
atgatgtggtrgtatgtacta

SEQ ID NO: 35791 - DNA, 21 bp, Homo sapiens
ctatgcttatrtaagtgagca

SEQ ID NO: 35792 - DNA, 21 bp, Homo sapiens
attggtctccragacctatga

SEQ ID NO: 35793 - DNA, 21 bp, Homo sapiens
tgggcaaagtrgagaatggtc

SEQ ID NO: 35794 - DNA, 21 bp, Homo sapiens
ttggttgttgytggtgtatag

SEQ ID NO: 35795 - DNA, 21 bp, Homo sapiens
aggaaagaatracaaaaaaga

SEQ ID NO: 35796 - DNA, 21 bp, Homo sapiens
ttttaaaaagscttgtccagg

SEQ ID NO: 35797 - DNA, 21 bp, Homo sapiens
agagaactaayccataagcga

SEQ ID NO: 35798 - DNA, 21 bp, Homo sapiens
atgacagtaasagaccagagc

SEQ ID NO: 35799 - DNA, 21 bp, Homo sapiens
ctaaagaaatrttaggtcata

SEQ ID NO: 35800 - DNA, 21 bp, Homo sapiens
gaatagccagrtgtgtccaga

SEQ ID NO: 35801 - DNA, 21 bp, Homo sapiens
aagttcaatawagaatgataa

SEQ ID NO: 35802 - DNA, 21 bp, Homo sapiens
tttgtgatggrctccttaaat

SEQ ID NO: 35803 - DNA, 21 bp, Homo sapiens
cttctgctccmagaatctcct

SEQ ID NO: 35804 - DNA, 21 bp, Homo sapiens
actccttggtrtttacccaaa

SEQ ID NO: 35805 - DNA, 21 bp, Homo sapiens
tttatttaagytccacgagaa

SEQ ID NO: 35806 - DNA, 21 bp, Homo sapiens
ctcccagagargcaactgcag

SEQ ID NO: 35807 - DNA, 21 bp, Homo sapiens
gtgggtatgaygtggaatact

SEQ ID NO: 35808 - DNA, 21 bp, Homo sapiens
ccagagagtarggattactaa

SEQ ID NO: 35809 - DNA, 21 bp, Homo sapiens
tgtaagatttrtattctttgt

SEQ ID NO: 35810 - DNA, 21 bp, Homo sapiens
tttttccttawaattttacat

SEQ ID NO: 35811 - DNA, 21 bp, Homo sapiens
ctaaatttttrttgaaaagta

SEQ ID NO: 35812 - DNA, 21 bp, Homo sapiens
ttcctcatcartgagcacacg

SEQ ID NO: 35813 - DNA, 21 bp, Homo sapiens
ggaagcaaagytgcaggagaa

SEQ ID NO: 35814 - DNA, 21 bp, Homo sapiens
taatagtctaktgttaccctg

SEQ ID NO: 35815 - DNA, 21 bp, Homo sapiens
aaatactgacyggtttttaga

SEQ ID NO: 35816 - DNA, 21 bp, Homo sapiens
aaatttaattyaagcaaaaga

SEQ ID NO: 35817 - DNA, 21 bp, Homo sapiens
aaggggttcartgtttatgga

SEQ ID NO: 35818 - DNA, 21 bp, Homo sapiens
aaggtctctamaaggaaaatg

SEQ ID NO: 35819 - DNA, 21 bp, Homo sapiens
ctttccagtawtgtccattat

SEQ ID NO: 35820 - DNA, 21 bp, Homo sapiens
atggtggggcrgatcattcct

SEQ ID NO: 35821 - DNA, 21 bp, Homo sapiens
agagtttgacyaaagacaagc

SEQ ID NO: 35822 - DNA, 21 bp, Homo sapiens
aactcccttgrcgttttaggg

SEQ ID NO: 35823 - DNA, 21 bp, Homo sapiens
aacagagtggrcatagtcttc

SEQ ID NO: 35824 - DNA, 21 bp, Homo sapiens
gcagacatgcmgtgaatgtcc

SEQ ID NO: 35825 - DNA, 21 bp, Homo sapiens
aatgttgtagygtgtcatcag

SEQ ID NO: 35826 - DNA, 21 bp, Homo sapiens
agacggagccrcagagcctgt

SEQ ID NO: 35827 - DNA, 21 bp, Homo sapiens
ggccctctgcrttttcaaaca

SEQ ID NO: 35828 - DNA, 21 bp, Homo sapiens
agcacaagacygactaactgt

SEQ ID NO: 35829 - DNA, 21 bp, Homo sapiens
atgtttactartgcacggaag

SEQ ID NO: 35830 - DNA, 21 bp, Homo sapiens
tgtggggcttyatccatacag

SEQ ID NO: 35831 - DNA, 21 bp, Homo sapiens
ctaggcaattraacccagaaa

SEQ ID NO: 35832 - DNA, 21 bp, Homo sapiens
tagggcttgartgaaggaaat

SEQ ID NO: 35833 - DNA, 21 bp, Homo sapiens
gcagatctcarttggaaaagg

SEQ ID NO: 35834 - DNA, 21 bp, Homo sapiens
gaggatgagayccctgccatc

SEQ ID NO: 35835 - DNA, 21 bp, Homo sapiens
gtggcccagcrggcaggcggg

SEQ ID NO: 35836 - DNA, 21 bp, Homo sapiens
aggtcacaccrtctctcatca

SEQ ID NO: 35837 - DNA, 21 bp, Homo sapiens
catgattaacrtttgcaaata

SEQ ID NO: 35838 - DNA, 21 bp, Homo sapiens
ttatccagagktgggaagatc

SEQ ID NO: 35839 - DNA, 21 bp, Homo sapiens
aataaacagckgctatcagtg

SEQ ID NO: 35840 - DNA, 21 bp, Homo sapiens
aactttgtccrtccctccatt

SEQ ID NO: 35841 - DNA, 21 bp, Homo sapiens
gattttggacwagtgatttca

SEQ ID NO: 35842 - DNA, 21 bp, Homo sapiens
cctcttcccaygtgacctctc

SEQ ID NO: 35843 - DNA, 21 bp, Homo sapiens
gtagacactgsttataattta

SEQ ID NO: 35844 - DNA, 21 bp, Homo sapiens
tctcagatgayttcccccctc

SEQ ID NO: 35845 - DNA, 21 bp, Homo sapiens
tagggtaactmggagttctcc

SEQ ID NO: 35846 - DNA, 21 bp, Homo sapiens
cactttggctrtttcatgatc

SEQ ID NO: 35847 - DNA, 21 bp, Homo sapiens
aattcaaggcrgatcacactg

SEQ ID NO: 35848 - DNA, 21 bp, Homo sapiens
tttaaataaasagttcagcaa

SEQ ID NO: 35849 - DNA, 21 bp, Homo sapiens
ctggccaggcraggctgctgg

SEQ ID NO: 35850 - DNA, 21 bp, Homo sapiens
aataaatagawctgtatcaac

SEQ ID NO: 35851 - DNA, 21 bp, Homo sapiens
atcagaatctrtcccattttc

SEQ ID NO: 35852 - DNA, 21 bp, Homo sapiens
ggggaagttcyttctttgttt

SEQ ID NO: 35853 - DNA, 21 bp, Homo sapiens
gactatacttrcttgtgaagc

SEQ ID NO: 35854 - DNA, 21 bp, Homo sapiens
atactactctstacttatatc

SEQ ID NO: 35855 - DNA, 21 bp, Homo sapiens
aaatctggagsctgagtttcc

SEQ ID NO: 35856 - DNA, 21 bp, Homo sapiens
tatggaaggcytgtatgcact

SEQ ID NO: 35857 - DNA, 21 bp, Homo sapiens
tatctattaayatataaatct

SEQ ID NO: 35858 - DNA, 21 bp, Homo sapiens
ggagaacaaaygcaagcaatt

SEQ ID NO: 35859 - DNA, 21 bp, Homo sapiens
tgcctagaackgtgcttggca

SEQ ID NO: 35860 - DNA, 21 bp, Homo sapiens
gaaaacttcaygaaattacag

SEQ ID NO: 35861 - DNA, 21 bp, Homo sapiens
gtgcttttttstaagctgata

SEQ ID NO: 35862 - DNA, 21 bp, Homo sapiens
agatgcatagrtattatgaga

SEQ ID NO: 35863 - DNA, 21 bp, Homo sapiens
gaaagttgcaragcttcccaa

SEQ ID NO: 35864 - DNA, 21 bp, Homo sapiens
gataataagtrtaatgcccga

SEQ ID NO: 35865 - DNA, 21 bp, Homo sapiens
ctatctcctgytatcaaggag

SEQ ID NO: 35866 - DNA, 21 bp, Homo sapiens
ccagttcactrgagtccaggc

SEQ ID NO: 35867 - DNA, 21 bp, Homo sapiens
attacctctgytggtttcagg

SEQ ID NO: 35868 - DNA, 21 bp, Homo sapiens
tcttttttttktttgttttga

SEQ ID NO: 35869 - DNA, 21 bp, Homo sapiens
attacattaasaatctgactc

SEQ ID NO: 35870 - DNA, 21 bp, Homo sapiens
aggctcacctrggcgccccct

SEQ ID NO: 35871 - DNA, 21 bp, Homo sapiens
aggatataaamgacccttgca

SEQ ID NO: 35872 - DNA, 21 bp, Homo sapiens
agaaattcggytgtcatgaaa

SEQ ID NO: 35873 - DNA, 21 bp, Homo sapiens
gaatttagatrttattcacaa

SEQ ID NO: 35874 - DNA, 21 bp, Homo sapiens
agtggtgtctsaaaaccctgg

SEQ ID NO: 35875 - DNA, 21 bp, Homo sapiens
cgcccagcctycatttttctt

SEQ ID NO: 35876 - DNA, 21 bp, Homo sapiens
ggatagtccaratttgtctcc

SEQ ID NO: 35877 - DNA, 21 bp, Homo sapiens
ggctcaagtgrtaaggaaatg

SEQ ID NO: 35878 - DNA, 21 bp, Homo sapiens
gaaaggcaagrtaattggaat

SEQ ID NO: 35879 - DNA, 21 bp, Homo sapiens
ggtaaaataasctaatccaaa

SEQ ID NO: 35880 - DNA, 21 bp, Homo sapiens
tacaggatatwaagtaacatg

SEQ ID NO: 35881 - DNA, 21 bp, Homo sapiens
cacaccaagcwcttcattctc

SEQ ID NO: 35882 - DNA, 21 bp, Homo sapiens
gaacatctatraggtgctgcc

SEQ ID NO: 35883 - DNA, 21 bp, Homo sapiens
gacagtaacgmttgccatggt

SEQ ID NO: 35884 - DNA, 21 bp, Homo sapiens
agaaagcaatkaatgacaact

SEQ ID NO: 35885 - DNA, 21 bp, Homo sapiens
cctgggctcasaacttaaaag

SEQ ID NO: 35886 - DNA, 21 bp, Homo sapiens
gattgcaaatmggtcaaacta

SEQ ID NO: 35887 - DNA, 21 bp, Homo sapiens
gtgcatcttamcacgcagaga

SEQ ID NO: 35888 - DNA, 21 bp, Homo sapiens
tgttatgaggsctaaattcaa

SEQ ID NO: 35889 - DNA, 21 bp, Homo sapiens
tgtttctgttygcctcatccg

SEQ ID NO: 35890 - DNA, 21 bp, Homo sapiens
ttatcaagtayatgtcagata

SEQ ID NO: 35891 - DNA, 21 bp, Homo sapiens
ccacctagcargcattcaaac

SEQ ID NO: 35892 - DNA, 21 bp, Homo sapiens
tcttgccaaartgagaggaat

SEQ ID NO: 35893 - DNA, 21 bp, Homo sapiens
agctccagtgycccttctcag

SEQ ID NO: 35894 - DNA, 21 bp, Homo sapiens
ttagagtctgytctagataat

SEQ ID NO: 35895 - DNA, 21 bp, Homo sapiens
tgatttaatayataggtctat

SEQ ID NO: 35896 - DNA, 21 bp, Homo sapiens
cccccacccastaagttgttc

SEQ ID NO: 35897 - DNA, 21 bp, Homo sapiens
aaactggtcarctaggactga

SEQ ID NO: 35898 - DNA, 21 bp, Homo sapiens
agtctcttccycttcgtgctc

SEQ ID NO: 35899 - DNA, 21 bp, Homo sapiens
tgtgtcagtayactttctgat

SEQ ID NO: 35900 - DNA, 21 bp, Homo sapiens
ctaagtttctrtttaaatcaa

SEQ ID NO: 35901 - DNA, 21 bp, Homo sapiens
gtagatctcayctaaaataaa

SEQ ID NO: 35902 - DNA, 21 bp, Homo sapiens
agggaacataycattttaact

SEQ ID NO: 35903 - DNA, 21 bp, Homo sapiens
ccacaatatgractctatgca

SEQ ID NO: 35904 - DNA, 21 bp, Homo sapiens
tctcattcttyaggtctcatt

SEQ ID NO: 35905 - DNA, 21 bp, Homo sapiens
aggtttagagytgcttttttc

SEQ ID NO: 35906 - DNA, 21 bp, Homo sapiens
ttaaaagtacsttttctgtgt

SEQ ID NO: 35907 - DNA, 21 bp, Homo sapiens
ttttaccatgscttaacctct

SEQ ID NO: 35908 - DNA, 21 bp, Homo sapiens
tttttaagctrttgtttaatt

SEQ ID NO: 35909 - DNA, 21 bp, Homo sapiens
ggctattcacygtatcaatgg

SEQ ID NO: 35910 - DNA, 21 bp, Homo sapiens
gagtatctacyaaattattga

SEQ ID NO: 35911 - DNA, 21 bp, Homo sapiens
atgtttagagractcctgtac

SEQ ID NO: 35912 - DNA, 21 bp, Homo sapiens
acaatccatcyggcaccttgg

SEQ ID NO: 35913 - DNA, 21 bp, Homo sapiens
taatttctctrttgatgactc

SEQ ID NO: 35914 - DNA, 21 bp, Homo sapiens
aaatcaacccyccaccaaacc

SEQ ID NO: 35915 - DNA, 21 bp, Homo sapiens
atgttagccawtattattgct

SEQ ID NO: 35916 - DNA, 21 bp, Homo sapiens
ataatgtctayctagttaaca

SEQ ID NO: 35917 - DNA, 21 bp, Homo sapiens
cacaggtagaygtatggcaga

SEQ ID NO: 35918 - DNA, 21 bp, Homo sapiens
gatggagtccygtggtagcct

SEQ ID NO: 35919 - DNA, 21 bp, Homo sapiens
ctgtcttatcracggaatggt

SEQ ID NO: 35920 - DNA, 21 bp, Homo sapiens
tctgctacacrttaatgggat

SEQ ID NO: 35921 - DNA, 21 bp, Homo sapiens
attgcttttgrgagtgtaaat

SEQ ID NO: 35922 - DNA, 21 bp, Homo sapiens
tgtgtttctayagtatggccc

SEQ ID NO: 35923 - DNA, 21 bp, Homo sapiens
tcaaacaacasccaaagattt

SEQ ID NO: 35924 - DNA, 21 bp, Homo sapiens
caggctttcawatgcttgata

SEQ ID NO: 35925 - DNA, 21 bp, Homo sapiens
tctggctagawactatgacgt

SEQ ID NO: 35926 - DNA, 21 bp, Homo sapiens
gcctagaagtrtgtactgaaa

SEQ ID NO: 35927 - DNA, 21 bp, Homo sapiens
ctatactaccrttgaaagaac

SEQ ID NO: 35928 - DNA, 21 bp, Homo sapiens
ctgatatgttkggatctgttc

SEQ ID NO: 35929 - DNA, 21 bp, Homo sapiens
tttttgaggartttacagttg

SEQ ID NO: 35930 - DNA, 21 bp, Homo sapiens
aggaagaggakatataatgtg

SEQ ID NO: 35931 - DNA, 21 bp, Homo sapiens
attctgagtartgttcaaaaa

SEQ ID NO: 35932 - DNA, 21 bp, Homo sapiens
ggacgagtgtkaatgttgcat

SEQ ID NO: 35933 - DNA, 21 bp, Homo sapiens
cttttcgtttstcctcatcct

SEQ ID NO: 35934 - DNA, 21 bp, Homo sapiens
agttctcctcytataatgtag

SEQ ID NO: 35935 - DNA, 21 bp, Homo sapiens
tgtgagtggtmaatcagtact

SEQ ID NO: 35936 - DNA, 21 bp, Homo sapiens
gtctccagctrtatggaatgc

SEQ ID NO: 35937 - DNA, 21 bp, Homo sapiens
attaagaatcrattatccatc

SEQ ID NO: 35938 - DNA, 21 bp, Homo sapiens
ggcatagtcarataaagtaag

SEQ ID NO: 35939 - DNA, 21 bp, Homo sapiens
agatgacaccrtgtcccactt

SEQ ID NO: 35940 - DNA, 21 bp, Homo sapiens
atcagtcaaaraaaggtgaaa

SEQ ID NO: 35941 - DNA, 21 bp, Homo sapiens
agtcagaaacrtcaaggacga

SEQ ID NO: 35942 - DNA, 21 bp, Homo sapiens
aactgatatarctgttagtca

SEQ ID NO: 35943 - DNA, 21 bp, Homo sapiens
tcatgtgagaygagaaagaga

SEQ ID NO: 35944 - DNA, 21 bp, Homo sapiens
atcttgtattwcttgtaccaa

SEQ ID NO: 35945 - DNA, 21 bp, Homo sapiens
gccagcattgsataaatagcc

SEQ ID NO: 35946 - DNA, 21 bp, Homo sapiens
agtccaggaarctccgcatta

SEQ ID NO: 35947 - DNA, 21 bp, Homo sapiens
ccacagcagcraccagtgctc

SEQ ID NO: 35948 - DNA, 21 bp, Homo sapiens
tctcatgaccyaactttctga

SEQ ID NO: 35949 - DNA, 21 bp, Homo sapiens
tgaactttgaycctcagagtc

SEQ ID NO: 35950 - DNA, 21 bp, Homo sapiens
gttaacggccwaaaaggattc

SEQ ID NO: 35951 - DNA, 21 bp, Homo sapiens
ctacgtggccrtctgcaaccc

SEQ ID NO: 35952 - DNA, 21 bp, Homo sapiens
tgctatgaagmaaaacgtaga

SEQ ID NO: 35953 - DNA, 21 bp, Homo sapiens
ataagcctccrtcctgcccag

SEQ ID NO: 35954 - DNA, 21 bp, Homo sapiens
tcatcagaacmaaatctgcta

SEQ ID NO: 35955 - DNA, 21 bp, Homo sapiens
ttgcccatggyacactcccct

SEQ ID NO: 35956 - DNA, 21 bp, Homo sapiens
caaacacaatrcacattagaa

SEQ ID NO: 35957 - DNA, 21 bp, Homo sapiens
ccatagatagrataatgaaaa

SEQ ID NO: 35958 - DNA, 21 bp, Homo sapiens
tgaacatgaaraaaaggaaat

SEQ ID NO: 35959 - DNA, 21 bp, Homo sapiens
gactcagtagsattttacctt

SEQ ID NO: 35960 - DNA, 21 bp, Homo sapiens
ttatttccccrcatgaaaatg

SEQ ID NO: 35961 - DNA, 21 bp, Homo sapiens
attatttgaartagatttgaa

SEQ ID NO: 35962 - DNA, 21 bp, Homo sapiens
gatcctctcaytcagttgtgt

SEQ ID NO: 35963 - DNA, 21 bp, Homo sapiens
taaataaatgycatttgcttt

SEQ ID NO: 35964 - DNA, 21 bp, Homo sapiens
gttgcagtaaytgactcagcc

SEQ ID NO: 35965 - DNA, 21 bp, Homo sapiens
tacctagaggyaagaattggc

SEQ ID NO: 35966 - DNA, 21 bp, Homo sapiens
ggtctttgtcyttttagtggt

SEQ ID NO: 35967 - DNA, 21 bp, Homo sapiens
gtcatggggcraaactgaatt

SEQ ID NO: 35968 - DNA, 21 bp, Homo sapiens
aacatcaaaaycatcagttgt

SEQ ID NO: 35969 - DNA, 21 bp, Homo sapiens
ttccatggackgccccaaaga

SEQ ID NO: 35970 - DNA, 21 bp, Homo sapiens
gtggaaccagytgggaccttg

SEQ ID NO: 35971 - DNA, 21 bp, Homo sapiens
atgtttaggtrctgagggaga

SEQ ID NO: 35972 - DNA, 21 bp, Homo sapiens
tacaaggaagstttgtggcag

SEQ ID NO: 35973 - DNA, 21 bp, Homo sapiens
ttttgtaggcraaccatcttg

SEQ ID NO: 35974 - DNA, 21 bp, Homo sapiens
aatagtctaayaacaaacggt

SEQ ID NO: 35975 - DNA, 21 bp, Homo sapiens
cctcatttttsctcggtgtgt

SEQ ID NO: 35976 - DNA, 21 bp, Homo sapiens
aacacatcttsaatgcagaat

SEQ ID NO: 35977 - DNA, 21 bp, Homo sapiens
ctcagagtctstatcagaaaa

SEQ ID NO: 35978 - DNA, 21 bp, Homo sapiens
agtatgatgcygtatattttt

SEQ ID NO: 35979 - DNA, 21 bp, Homo sapiens
tcagtcctttmcattcattca

SEQ ID NO: 35980 - DNA, 21 bp, Homo sapiens
ataaaactgtstctgctgctg

SEQ ID NO: 35981 - DNA, 21 bp, Homo sapiens
gtcttacagtrttctacagca

SEQ ID NO: 35982 - DNA, 21 bp, Homo sapiens
agcagctcctrttagcaactg

SEQ ID NO: 35983 - DNA, 21 bp, Homo sapiens
catgtaagtcycttctctgaa

SEQ ID NO: 35984 - DNA, 21 bp, Homo sapiens
tgagaccgtcrtcttacctgg

SEQ ID NO: 35985 - DNA, 21 bp, Homo sapiens
tactctactgmagcagacaga

SEQ ID NO: 35986 - DNA, 21 bp, Homo sapiens
atcatggcaaratttcatagg

SEQ ID NO: 35987 - DNA, 21 bp, Homo sapiens
catacgaaccraatgagtgat

SEQ ID NO: 35988 - DNA, 21 bp, Homo sapiens
agagccaagasaaaggggtgg

SEQ ID NO: 35989 - DNA, 21 bp, Homo sapiens
aatgacataaygaattaagtg

SEQ ID NO: 35990 - DNA, 21 bp, Homo sapiens
gtctctatacktggagcatga

SEQ ID NO: 35991 - DNA, 21 bp, Homo sapiens
gcccatatttmtgtaacaaaa

SEQ ID NO: 35992 - DNA, 21 bp, Homo sapiens
ttaataagttrcagtcagtta

SEQ ID NO: 35993 - DNA, 21 bp, Homo sapiens
gcccatctacygtcttttcta

SEQ ID NO: 35994 - DNA, 21 bp, Homo sapiens
gaatgaaaatrgatgatagtt

SEQ ID NO: 35995 - DNA, 21 bp, Homo sapiens
aagccaaatgrcaaatgatag

SEQ ID NO: 35996 - DNA, 21 bp, Homo sapiens
ttaacattccyatccctttgg

SEQ ID NO: 35997 - DNA, 21 bp, Homo sapiens
caatcttgcckgttaggtctt

SEQ ID NO: 35998 - DNA, 21 bp, Homo sapiens
tactacagaamaaatctttat

SEQ ID NO: 35999 - DNA, 21 bp, Homo sapiens
ctcatttattyggatttggaa

SEQ ID NO: 36000 - DNA, 21 bp, Homo sapiens
tatgtcaactrgtagccagag

SEQ ID NO: 36001 - DNA, 21 bp, Homo sapiens
tttgaacaatyggtatataag

SEQ ID NO: 36002 - DNA, 21 bp, Homo sapiens
tacctttagtytaagcattta

SEQ ID NO: 36003 - DNA, 21 bp, Homo sapiens
ctgcctatcaracagtggtgt

SEQ ID NO: 36004 - DNA, 21 bp, Homo sapiens
taggtactctyagaattatgt

SEQ ID NO: 36005 - DNA, 21 bp, Homo sapiens
caggacattayagctaatttt

SEQ ID NO: 36006 - DNA, 21 bp, Homo sapiens
gcaacctaaaygataataata

SEQ ID NO: 36007 - DNA, 21 bp, Homo sapiens
tctgactcttrttggattgga

SEQ ID NO: 36008 - DNA, 21 bp, Homo sapiens
gatcccaaaayaattgccata

SEQ ID NO: 36009 - DNA, 21 bp, Homo sapiens
actattttcgwatttacttat

SEQ ID NO: 36010 - DNA, 21 bp, Homo sapiens
gattttctgcraaacttctgt

SEQ ID NO: 36011 - DNA, 21 bp, Homo sapiens
ttatgatgtawctttgattat

SEQ ID NO: 36012 - DNA, 21 bp, Homo sapiens
ggataccaaayaggttgcggc

SEQ ID NO: 36013 - DNA, 21 bp, Homo sapiens
ggcttctgcaytaataaagga

SEQ ID NO: 36014 - DNA, 21 bp, Homo sapiens
tggataaaatygttggttgga

SEQ ID NO: 36015 - DNA, 21 bp, Homo sapiens
caatgcaagtrtaggaaagac

SEQ ID NO: 36016 - DNA, 21 bp, Homo sapiens
tcccttttatyaggaaattga

SEQ ID NO: 36017 - DNA, 21 bp, Homo sapiens
tggcagtttaytaatttacca

SEQ ID NO: 36018 - DNA, 21 bp, Homo sapiens
gtcagcattcmacaattgtgc

SEQ ID NO: 36019 - DNA, 21 bp, Homo sapiens
gctcaggagcrgagcttaggc

SEQ ID NO: 36020 - DNA, 21 bp, Homo sapiens
agacaaggtargtggacatcc

SEQ ID NO: 36021 - DNA, 21 bp, Homo sapiens
ggcagagaagytagaagtgtc

SEQ ID NO: 36022 - DNA, 21 bp, Homo sapiens
cttttttcacytggtatctca

SEQ ID NO: 36023 - DNA, 21 bp, Homo sapiens
actaaagcctsgttatctcct

SEQ ID NO: 36024 - DNA, 21 bp, Homo sapiens
gtctcccctcrgagttagcca

SEQ ID NO: 36025 - DNA, 21 bp, Homo sapiens
catacaaaatracaggtgggt

SEQ ID NO: 36026 - DNA, 21 bp, Homo sapiens
ctatagcaggragcagacaca

SEQ ID NO: 36027 - DNA, 21 bp, Homo sapiens
tgcatggaggyaagttatatt

SEQ ID NO: 36028 - DNA, 21 bp, Homo sapiens
cattataacckgctattggat

SEQ ID NO: 36029 - DNA, 21 bp, Homo sapiens
aggggctcttmcaagaaggcc

SEQ ID NO: 36030 - DNA, 21 bp, Homo sapiens
cttaaagttcygggcattccc

SEQ ID NO: 36031 - DNA, 21 bp, Homo sapiens
tttccacaacwgaagggctgc

SEQ ID NO: 36032 - DNA, 21 bp, Homo sapiens
aggctggtgtkgaagaccaaa

SEQ ID NO: 36033 - DNA, 21 bp, Homo sapiens
aaagttttaartatcagagga

SEQ ID NO: 36034 - DNA, 21 bp, Homo sapiens
tcatcattacrgttaaattat

SEQ ID NO: 36035 - DNA, 21 bp, Homo sapiens
ctctttcaggrctgttggtac

SEQ ID NO: 36036 - DNA, 21 bp, Homo sapiens
ctatctggaayctgggtgaga

SEQ ID NO: 36037 - DNA, 21 bp, Homo sapiens
ttattgaaatrgtactaggat

SEQ ID NO: 36038 - DNA, 21 bp, Homo sapiens
aaggggaaagkttctgccaaa

SEQ ID NO: 36039 - DNA, 21 bp, Homo sapiens
tcctgggcaartgatacttgt

SEQ ID NO: 36040 - DNA, 21 bp, Homo sapiens
tattcatcgtygtttctaagt

SEQ ID NO: 36041 - DNA, 21 bp, Homo sapiens
ctattttgttyatccagctat

SEQ ID NO: 36042 - DNA, 21 bp, Homo sapiens
acattctcatygatagctggt

SEQ ID NO: 36043 - DNA, 21 bp, Homo sapiens
tcttcattgcygttcagtgct

SEQ ID NO: 36044 - DNA, 21 bp, Homo sapiens
caacacactcractagtttac

SEQ ID NO: 36045 - DNA, 21 bp, Homo sapiens
gctcattactrgaaaaaaaaa

SEQ ID NO: 36046 - DNA, 21 bp, Homo sapiens
acatccctcgkggacataact

SEQ ID NO: 36047 - DNA, 21 bp, Homo sapiens
caccttgtttygttcattttc

SEQ ID NO: 36048 - DNA, 21 bp, Homo sapiens
tatgccatgtrttcctccctg

SEQ ID NO: 36049 - DNA, 21 bp, Homo sapiens
tagtggaatgytgagccacca

SEQ ID NO: 36050 - DNA, 21 bp, Homo sapiens
ggaagtataargtggatattc

SEQ ID NO: 36051 - DNA, 21 bp, Homo sapiens
gtaatcaagayatcctatgtt

SEQ ID NO: 36052 - DNA, 21 bp, Homo sapiens
cttatacgtaygactctagcc

SEQ ID NO: 36053 - DNA, 21 bp, Homo sapiens
taatgtgtttyctccatatag

SEQ ID NO: 36054 - DNA, 21 bp, Homo sapiens
aattcttatcrgcctgtccct

SEQ ID NO: 36055 - DNA, 21 bp, Homo sapiens
agattaatgtmcctgatttaa

SEQ ID NO: 36056 - DNA, 21 bp, Homo sapiens
gccactcaacsccagactttt

SEQ ID NO: 36057 - DNA, 21 bp, Homo sapiens
atcttaggatyagcgttcact

SEQ ID NO: 36058 - DNA, 21 bp, Homo sapiens
aaaacattatwaaacccggtt

SEQ ID NO: 36059 - DNA, 21 bp, Homo sapiens
ttgtgactctycactgacaca

SEQ ID NO: 36060 - DNA, 21 bp, Homo sapiens
tctgaaaatcrccatctgtaa

SEQ ID NO: 36061 - DNA, 21 bp, Homo sapiens
aatccaattgyctgactttaa

SEQ ID NO: 36062 - DNA, 21 bp, Homo sapiens
atggcagtcarcttcctctca

SEQ ID NO: 36063 - DNA, 21 bp, Homo sapiens
taacaaaagayttgacataaa

SEQ ID NO: 36064 - DNA, 21 bp, Homo sapiens
atacctggacrtatgatgctt

SEQ ID NO: 36065 - DNA, 21 bp, Homo sapiens
atcaagtttaytgaaaaataa

SEQ ID NO: 36066 - DNA, 21 bp, Homo sapiens
caaagacatayatccacagtg

SEQ ID NO: 36067 - DNA, 21 bp, Homo sapiens
ttaaccaagcrcaagcatgac

SEQ ID NO: 36068 - DNA, 21 bp, Homo sapiens
gagatgtcccraggaaaccca

SEQ ID NO: 36069 - DNA, 21 bp, Homo sapiens
aaaaataagaygctacccttt

SEQ ID NO: 36070 - DNA, 21 bp, Homo sapiens
cattttcccaytttggaatag

SEQ ID NO: 36071 - DNA, 21 bp, Homo sapiens
ctagggcagcmgtattaaact

SEQ ID NO: 36072 - DNA, 21 bp, Homo sapiens
cagtgtgaacwtcagtgaaac

SEQ ID NO: 36073 - DNA, 21 bp, Homo sapiens
acaacgtaagrgattgtattt

SEQ ID NO: 36074 - DNA, 21 bp, Homo sapiens
ctggggtgagrttggtttaaa

SEQ ID NO: 36075 - DNA, 21 bp, Homo sapiens
acataaaatcrtggcatacag

SEQ ID NO: 36076 - DNA, 21 bp, Homo sapiens
tgtttgctatmttgtaatcta

SEQ ID NO: 36077 - DNA, 21 bp, Homo sapiens
tttaatacacyatggcctcat

SEQ ID NO: 36078 - DNA, 21 bp, Homo sapiens
aatggagtctsagttacttct

SEQ ID NO: 36079 - DNA, 21 bp, Homo sapiens
cattcaaactyaaggttcaaa

SEQ ID NO: 36080 - DNA, 21 bp, Homo sapiens
aatggaatgasctttgtactg

SEQ ID NO: 36081 - DNA, 21 bp, Homo sapiens
agtccctcatyggtctctggt

SEQ ID NO: 36082 - DNA, 21 bp, Homo sapiens
aagtccagaaygtagaagtat

SEQ ID NO: 36083 - DNA, 21 bp, Homo sapiens
gtgtttttatyccctaggagc

SEQ ID NO: 36084 - DNA, 21 bp, Homo sapiens
tcttcgtcctrctgcccttgt

SEQ ID NO: 36085 - DNA, 21 bp, Homo sapiens
ggttatgattyggtactatac

SEQ ID NO: 36086 - DNA, 21 bp, Homo sapiens
acaggatatakagaagaagcc

SEQ ID NO: 36087 - DNA, 21 bp, Homo sapiens
tgttagccaayataattagaa

SEQ ID NO: 36088 - DNA, 21 bp, Homo sapiens
tttagctttcygtcctacact

SEQ ID NO: 36089 - DNA, 21 bp, Homo sapiens
gcgccatagcsaaaggcgtta

SEQ ID NO: 36090 - DNA, 21 bp, Homo sapiens
cagaagcctcyatggcattat

SEQ ID NO: 36091 - DNA, 21 bp, Homo sapiens
ttgtctgtgaytgaagcaatg

SEQ ID NO: 36092 - DNA, 21 bp, Homo sapiens
agaaaacaggmagacaatagc

SEQ ID NO: 36093 - DNA, 21 bp, Homo sapiens
catcccattayaaacattcag

SEQ ID NO: 36094 - DNA, 21 bp, Homo sapiens
gatgccaaacrttgctggaga

SEQ ID NO: 36095 - DNA, 21 bp, Homo sapiens
gagacgctttmttttacattt

SEQ ID NO: 36096 - DNA, 21 bp, Homo sapiens
acttagccctrtatgagtcat

SEQ ID NO: 36097 - DNA, 21 bp, Homo sapiens
gatgtgtgaamagaaaaaagt

SEQ ID NO: 36098 - DNA, 21 bp, Homo sapiens
tgcacacccayagtcagacaa

SEQ ID NO: 36099 - DNA, 21 bp, Homo sapiens
cattaacctcrttttacagat

SEQ ID NO: 36100 - DNA, 21 bp, Homo sapiens
caagaaatgaytttaggccag

SEQ ID NO: 36101 - DNA, 21 bp, Homo sapiens
ccccttgtatytccttacact

SEQ ID NO: 36102 - DNA, 21 bp, Homo sapiens
atctcattttwaaaaagggac

SEQ ID NO: 36103 - DNA, 21 bp, Homo sapiens
ccttccatacrgagtttttaa

SEQ ID NO: 36104 - DNA, 21 bp, Homo sapiens
taaaattataygattggacta

SEQ ID NO: 36105 - DNA, 21 bp, Homo sapiens
tccaacaaggygttctagtat

SEQ ID NO: 36106 - DNA, 21 bp, Homo sapiens
aaagaggtatsgtgtggagta

SEQ ID NO: 36107 - DNA, 21 bp, Homo sapiens
cagagaaggcrttagacatga

SEQ ID NO: 36108 - DNA, 21 bp, Homo sapiens
ataactcattrtttcaaactg

SEQ ID NO: 36109 - DNA, 21 bp, Homo sapiens
cagacaaaaaraatgagagaa

SEQ ID NO: 36110 - DNA, 21 bp, Homo sapiens
gaagttcagayaggctggggc

SEQ ID NO: 36111 - DNA, 21 bp, Homo sapiens
gctcccttaastgaaggagga

SEQ ID NO: 36112 - DNA, 21 bp, Homo sapiens
ctagtggcccstcttgttttt

SEQ ID NO: 36113 - DNA, 21 bp, Homo sapiens
tattagaccartgtttccata

SEQ ID NO: 36114 - DNA, 21 bp, Homo sapiens
atttgaacaakgagttcatca

SEQ ID NO: 36115 - DNA, 21 bp, Homo sapiens
atcttccccarctcgctcttt

SEQ ID NO: 36116 - DNA, 21 bp, Homo sapiens
ctaataaaaaycccatactgt

SEQ ID NO: 36117 - DNA, 21 bp, Homo sapiens
ctaggataaamttgcactgct

SEQ ID NO: 36118 - DNA, 21 bp, Homo sapiens
tctgaccactraaaccacttg

SEQ ID NO: 36119 - DNA, 21 bp, Homo sapiens
ggtaatatgcrtaattttgga

SEQ ID NO: 36120 - DNA, 21 bp, Homo sapiens
tgccatggagyccagacctcc

SEQ ID NO: 36121 - DNA, 21 bp, Homo sapiens
gcgtaactccragaggcaaac

SEQ ID NO: 36122 - DNA, 21 bp, Homo sapiens
ctgagtatttrgagggcagaa

SEQ ID NO: 36123 - DNA, 21 bp, Homo sapiens
ctcccttgagycttgggcagt

SEQ ID NO: 36124 - DNA, 21 bp, Homo sapiens
ccctttctacygagcacagtc

SEQ ID NO: 36125 - DNA, 21 bp, Homo sapiens
taaacaatttygacctagatg

SEQ ID NO: 36126 - DNA, 21 bp, Homo sapiens
agccataatcrctgctctctg

SEQ ID NO: 36127 - DNA, 21 bp, Homo sapiens
atcttaagcaygatttcaaac

SEQ ID NO: 36128 - DNA, 21 bp, Homo sapiens
aaattatttcrttcccattga

SEQ ID NO: 36129 - DNA, 21 bp, Homo sapiens
cttaaataccrggtcagctga

SEQ ID NO: 36130 - DNA, 21 bp, Homo sapiens
tggcaataggyaagaggtcag

SEQ ID NO: 36131 - DNA, 21 bp, Homo sapiens
aatagttcttkctcgctcatt

SEQ ID NO: 36132 - DNA, 21 bp, Homo sapiens
ttagaagggarctactaatca

SEQ ID NO: 36133 - DNA, 21 bp, Homo sapiens
atttctatgtrggtcccttaa

SEQ ID NO: 36134 - DNA, 21 bp, Homo sapiens
catatctgtgyattttgtaga

SEQ ID NO: 36135 - DNA, 21 bp, Homo sapiens
aacatggccartcttttgaat

SEQ ID NO: 36136 - DNA, 21 bp, Homo sapiens
agttgatcggkatccataata

SEQ ID NO: 36137 - DNA, 21 bp, Homo sapiens
taagccattaktttttcatgt

SEQ ID NO: 36138 - DNA, 21 bp, Homo sapiens
ataattatgcrattctacatg

SEQ ID NO: 36139 - DNA, 21 bp, Homo sapiens
atcacttcttyatttcctatg

SEQ ID NO: 36140 - DNA, 21 bp, Homo sapiens
tttacacagaraaaaagacat

SEQ ID NO: 36141 - DNA, 21 bp, Homo sapiens
tctatgaccayattaagccag

SEQ ID NO: 36142 - DNA, 21 bp, Homo sapiens
aatggtttctrtttagcatgg

SEQ ID NO: 36143 - DNA, 21 bp, Homo sapiens
tctcagaatcrggacagaaag

SEQ ID NO: 36144 - DNA, 21 bp, Homo sapiens
ataaatgcacytgtacgtcaa

SEQ ID NO: 36145 - DNA, 21 bp, Homo sapiens
tgtgctttggratgatcaaaa

SEQ ID NO: 36146 - DNA, 21 bp, Homo sapiens
atgagtgtgcrtctaggctcc

SEQ ID NO: 36147 - DNA, 21 bp, Homo sapiens
ttcaagttcawgaataaagat

SEQ ID NO: 36148 - DNA, 21 bp, Homo sapiens
agtcatcaaamccaagctgca

SEQ ID NO: 36149 - DNA, 21 bp, Homo sapiens
ttggtgcgtgytacttaattc

SEQ ID NO: 36150 - DNA, 21 bp, Homo sapiens
aaggactactstatctgtatg

SEQ ID NO: 36151 - DNA, 21 bp, Homo sapiens
caacatcagartgctaattta

SEQ ID NO: 36152 - DNA, 21 bp, Homo sapiens
gcaaatataargccattttaa

SEQ ID NO: 36153 - DNA, 21 bp, Homo sapiens
ctaaagactgygctggacatt

SEQ ID NO: 36154 - DNA, 21 bp, Homo sapiens
ttcagttccaytgagtttagt

SEQ ID NO: 36155 - DNA, 21 bp, Homo sapiens
agagacaaagratagtaatgc

SEQ ID NO: 36156 - DNA, 21 bp, Homo sapiens
aaatttacatwgatgcacaat

SEQ ID NO: 36157 - DNA, 21 bp, Homo sapiens
tttctttaaaractttctaat

SEQ ID NO: 36158 - DNA, 21 bp, Homo sapiens
aattgtgcccrtaaaaaaagc

SEQ ID NO: 36159 - DNA, 21 bp, Homo sapiens
ttggaatgtgygtttgagtta

SEQ ID NO: 36160 - DNA, 21 bp, Homo sapiens
cagctcttacractacaagaa

SEQ ID NO: 36161 - DNA, 21 bp, Homo sapiens
tatgcattatrtattctcatg

SEQ ID NO: 36162 - DNA, 21 bp, Homo sapiens
ctcatgacttstccatgatcc

SEQ ID NO: 36163 - DNA, 21 bp, Homo sapiens
gattacctagyatacagatat

SEQ ID NO: 36164 - DNA, 21 bp, Homo sapiens
aattttagtaygaaggcattt

SEQ ID NO: 36165 - DNA, 21 bp, Homo sapiens
ctttgcttaakttgactggat

SEQ ID NO: 36166 - DNA, 21 bp, Homo sapiens
tagttacttcytttcctcaaa

SEQ ID NO: 36167 - DNA, 21 bp, Homo sapiens
taaatgctaaygggaaaatgt

SEQ ID NO: 36168 - DNA, 21 bp, Homo sapiens
cagtggatgcrcaaagccaca

SEQ ID NO: 36169 - DNA, 21 bp, Homo sapiens
atcaatcttgyggaatgggtg

SEQ ID NO: 36170 - DNA, 21 bp, Homo sapiens
aatatttttgrgacatatctt

SEQ ID NO: 36171 - DNA, 21 bp, Homo sapiens
ttgttaagtayaggcgctata

SEQ ID NO: 36172 - DNA, 21 bp, Homo sapiens
agatgggtatktaacaagttc

SEQ ID NO: 36173 - DNA, 21 bp, Homo sapiens
atagaaatccygaagctttaa

SEQ ID NO: 36174 - DNA, 21 bp, Homo sapiens
agttcatgtgkgctttggatg

SEQ ID NO: 36175 - DNA, 21 bp, Homo sapiens
ggggagaccamggattcggtg

SEQ ID NO: 36176 - DNA, 21 bp, Homo sapiens
ttggaaaatcygtaatcttct

SEQ ID NO: 36177 - DNA, 21 bp, Homo sapiens
taaggtatttyccttccagcc

SEQ ID NO: 36178 - DNA, 21 bp, Homo sapiens
gagaatatggratgtctacat

SEQ ID NO: 36179 - DNA, 21 bp, Homo sapiens
gctccttctgsacgtgtagaa

SEQ ID NO: 36180 - DNA, 21 bp, Homo sapiens
tccacattgawgactgtgtcc

SEQ ID NO: 36181 - DNA, 21 bp, Homo sapiens
aagaccttacyaggtccctct

SEQ ID NO: 36182 - DNA, 21 bp, Homo sapiens
acacaagcaaygatctcatct

SEQ ID NO: 36183 - DNA, 21 bp, Homo sapiens
ctgccttggtrtcatcattgc

SEQ ID NO: 36184 - DNA, 21 bp, Homo sapiens
ccacacagatmggtgctcagc

SEQ ID NO: 36185 - DNA, 21 bp, Homo sapiens
tttgggtcctraccggcacag

SEQ ID NO: 36186 - DNA, 21 bp, Homo sapiens
tttataatcartgtttccttt

SEQ ID NO: 36187 - DNA, 21 bp, Homo sapiens
atcagcatccytgatattcct

SEQ ID NO: 36188 - DNA, 21 bp, Homo sapiens
gaaagacatgyggatgcgtgt

SEQ ID NO: 36189 - DNA, 21 bp, Homo sapiens
tgtaatgttcratcaaataga

SEQ ID NO: 36190 - DNA, 21 bp, Homo sapiens
gatcaattatyttaaaagtat

SEQ ID NO: 36191 - DNA, 21 bp, Homo sapiens
agcaccttgcrtgtaggaagc

SEQ ID NO: 36192 - DNA, 21 bp, Homo sapiens
gggagaattcraatctctgtc

SEQ ID NO: 36193 - DNA, 21 bp, Homo sapiens
cttcttctcasccccttcaag

SEQ ID NO: 36194 - DNA, 21 bp, Homo sapiens
aatctcaaaamcctcttacct

SEQ ID NO: 36195 - DNA, 21 bp, Homo sapiens
agccatcgtgmgtggtgctgg

SEQ ID NO: 36196 - DNA, 21 bp, Homo sapiens
agcggatggartgcccaccag

SEQ ID NO: 36197 - DNA, 21 bp, Homo sapiens
agctatactgraactacataa

SEQ ID NO: 36198 - DNA, 21 bp, Homo sapiens
tgcattttaakaaagccttct

SEQ ID NO: 36199 - DNA, 21 bp, Homo sapiens
gggtacatcaycttacaaatc

SEQ ID NO: 36200 - DNA, 21 bp, Homo sapiens
cctttggtttygtaaaatgag

SEQ ID NO: 36201 - DNA, 21 bp, Homo sapiens
atgaagggctktttaatttgt

SEQ ID NO: 36202 - DNA, 21 bp, Homo sapiens
agtttctcgtsagggcaggcc

SEQ ID NO: 36203 - DNA, 21 bp, Homo sapiens
aatctctgtcrtttttgctag

SEQ ID NO: 36204 - DNA, 21 bp, Homo sapiens
aattttgagcrcacctagaaa

SEQ ID NO: 36205 - DNA, 21 bp, Homo sapiens
gaaaactgtcyaggctgagag

SEQ ID NO: 36206 - DNA, 21 bp, Homo sapiens
tctccatagcrtttatcaccc

SEQ ID NO: 36207 - DNA, 21 bp, Homo sapiens
tagtttgatayagccagagtg

SEQ ID NO: 36208 - DNA, 21 bp, Homo sapiens
aaaaaataatkcaaaggaccg

SEQ ID NO: 36209 - DNA, 21 bp, Homo sapiens
tctgtggcagrtggggtctct

SEQ ID NO: 36210 - DNA, 21 bp, Homo sapiens
tgtcaggctgyggaggtggct

SEQ ID NO: 36211 - DNA, 21 bp, Homo sapiens
atgttgattgyggttaacaag

SEQ ID NO: 36212 - DNA, 21 bp, Homo sapiens
tttccttcatratctcagggt

SEQ ID NO: 36213 - DNA, 21 bp, Homo sapiens
cgtaatcaatsttggctgtga

SEQ ID NO: 36214 - DNA, 21 bp, Homo sapiens
atggtgtttayaatgcgaaag

SEQ ID NO: 36215 - DNA, 21 bp, Homo sapiens
tgtttatacasacggtggaaa

SEQ ID NO: 36216 - DNA, 21 bp, Homo sapiens
tttcaaatggsagcttaaaaa

SEQ ID NO: 36217 - DNA, 21 bp, Homo sapiens
gtgtgggtgcrggagtcctcg

SEQ ID NO: 36218 - DNA, 21 bp, Homo sapiens
ccccagcttcrgtaaaagact

SEQ ID NO: 36219 - DNA, 21 bp, Homo sapiens
gactcagagasgctttttcgt

SEQ ID NO: 36220 - DNA, 21 bp, Homo sapiens
aaacttacccrtctccattgt

SEQ ID NO: 36221 - DNA, 21 bp, Homo sapiens
tcaatgttttmtaggtttttg

SEQ ID NO: 36222 - DNA, 21 bp, Homo sapiens
tccatctatcytttctccctg

SEQ ID NO: 36223 - DNA, 21 bp, Homo sapiens
agagcaaccgyggcctgggaa

SEQ ID NO: 36224 - DNA, 21 bp, Homo sapiens
gagtgatgacyaactggcact

SEQ ID NO: 36225 - DNA, 21 bp, Homo sapiens
tcatggagccracagacctag

SEQ ID NO: 36226 - DNA, 21 bp, Homo sapiens
gaatatgcagkttctttggcg

SEQ ID NO: 36227 - DNA, 21 bp, Homo sapiens
aatgaggtgaktggctatgtg

SEQ ID NO: 36228 - DNA, 21 bp, Homo sapiens
ctgcaacctakgctctcagtt

SEQ ID NO: 36229 - DNA, 21 bp, Homo sapiens
agacaggtctsacacttgtgg

SEQ ID NO: 36230 - DNA, 21 bp, Homo sapiens
acacggttggwtgcaaatgtc

SEQ ID NO: 36231 - DNA, 21 bp, Homo sapiens
ttctagcctaygacaagcata

SEQ ID NO: 36232 - DNA, 21 bp, Homo sapiens
tgatagtatcmtgcagttcca

SEQ ID NO: 36233 - DNA, 21 bp, Homo sapiens
aaatgagatcrgcagcatctg

SEQ ID NO: 36234 - DNA, 21 bp, Homo sapiens
cagcatcaatyctggtaaatg

SEQ ID NO: 36235 - DNA, 21 bp, Homo sapiens
tttgtatttckgtctcctaaa

SEQ ID NO: 36236 - DNA, 21 bp, Homo sapiens
tctgctgtcaytgaatgtgca

SEQ ID NO: 36237 - DNA, 21 bp, Homo sapiens
tctctcaggamtgaaactata

SEQ ID NO: 36238 - DNA, 21 bp, Homo sapiens
acttaggcttytaaaatttaa

SEQ ID NO: 36239 - DNA, 21 bp, Homo sapiens
catgttgaggyttccacaaca

SEQ ID NO: 36240 - DNA, 21 bp, Homo sapiens
ctcatcctaayggtagtactt

SEQ ID NO: 36241 - DNA, 21 bp, Homo sapiens
tagaagtctgwttattaggct

SEQ ID NO: 36242 - DNA, 21 bp, Homo sapiens
gccccacgtgrtgaggatatg

SEQ ID NO: 36243 - DNA, 21 bp, Homo sapiens
cctgggcccarcacacacatc

SEQ ID NO: 36244 - DNA, 21 bp, Homo sapiens
tttgatgtgcktatgcatgtt

SEQ ID NO: 36245 - DNA, 21 bp, Homo sapiens
actcttttagraagtaggagg

SEQ ID NO: 36246 - DNA, 21 bp, Homo sapiens
caagggaagayagtcattaac

SEQ ID NO: 36247 - DNA, 21 bp, Homo sapiens
agctgcacgtrtggacccagt

SEQ ID NO: 36248 - DNA, 21 bp, Homo sapiens
tgcagatccaygtcataaaca

SEQ ID NO: 36249 - DNA, 21 bp, Homo sapiens
gtttccttccrtttcatctgc

SEQ ID NO: 36250 - DNA, 21 bp, Homo sapiens
ggtggcccccragcacatctg

SEQ ID NO: 36251 - DNA, 21 bp, Homo sapiens
tgagtaacaasagtaagatgg

SEQ ID NO: 36252 - DNA, 21 bp, Homo sapiens
atcaatgagaygaatgaaaat

SEQ ID NO: 36253 - DNA, 21 bp, Homo sapiens
taagttcaatkttgtaagttc

SEQ ID NO: 36254 - DNA, 21 bp, Homo sapiens
atgaatgtgcrccagaggaaa

SEQ ID NO: 36255 - DNA, 21 bp, Homo sapiens
aaaggcataargagttagagg

SEQ ID NO: 36256 - DNA, 21 bp, Homo sapiens
agcaagcaccrcatgtgtttt

SEQ ID NO: 36257 - DNA, 21 bp, Homo sapiens
gtccattgccyacctaagcca

SEQ ID NO: 36258 - DNA, 21 bp, Homo sapiens
aatgcatcatyagggacgaag

SEQ ID NO: 36259 - DNA, 21 bp, Homo sapiens
aagtgtggtcratagacctgc

SEQ ID NO: 36260 - DNA, 21 bp, Homo sapiens
gttttggtgcmacacttgcaa

SEQ ID NO: 36261 - DNA, 21 bp, Homo sapiens
actatggactmgcttctgtgg

SEQ ID NO: 36262 - DNA, 21 bp, Homo sapiens
tcatctgcttrtgatttaaag

SEQ ID NO: 36263 - DNA, 21 bp, Homo sapiens
tcaagatcggrtgtgttcttt

SEQ ID NO: 36264 - DNA, 21 bp, Homo sapiens
tcctgagtaaytgacagttgc

SEQ ID NO: 36265 - DNA, 21 bp, Homo sapiens
cagcaatgccrcacctccacg

SEQ ID NO: 36266 - DNA, 21 bp, Homo sapiens
agagatgattrttataacagg

SEQ ID NO: 36267 - DNA, 21 bp, Homo sapiens
attatctccargttacataat

SEQ ID NO: 36268 - DNA, 21 bp, Homo sapiens
atcggagttgsttaaaagtgt

SEQ ID NO: 36269 - DNA, 21 bp, Homo sapiens
caacatgatayacaatagttc

SEQ ID NO: 36270 - DNA, 21 bp, Homo sapiens
tccctttctcwgtagtgactt

SEQ ID NO: 36271 - DNA, 21 bp, Homo sapiens
tgaaaacaaaygtccaatgac

SEQ ID NO: 36272 - DNA, 21 bp, Homo sapiens
atgcgtacttygctcccaggt

SEQ ID NO: 36273 - DNA, 21 bp, Homo sapiens
cttggattcayacagttgtcc

SEQ ID NO: 36274 - DNA, 21 bp, Homo sapiens
agaacatcatsaaaattactg

SEQ ID NO: 36275 - DNA, 21 bp, Homo sapiens
tattgggtctstttgggggat

SEQ ID NO: 36276 - DNA, 21 bp, Homo sapiens
ccacactaagygtttgatttt

SEQ ID NO: 36277 - DNA, 21 bp, Homo sapiens
atatcagatgstactactatg

SEQ ID NO: 36278 - DNA, 21 bp, Homo sapiens
aactggattgrataagaagtc

SEQ ID NO: 36279 - DNA, 21 bp, Homo sapiens
ttgctactttyacagagtaag

SEQ ID NO: 36280 - DNA, 21 bp, Homo sapiens
aaggccacagwctctcactat

SEQ ID NO: 36281 - DNA, 21 bp, Homo sapiens
tcagtttggayaatatacagt

SEQ ID NO: 36282 - DNA, 21 bp, Homo sapiens
ttcgcttgttragtattaatt

SEQ ID NO: 36283 - DNA, 21 bp, Homo sapiens
attgttattastagctagaac

SEQ ID NO: 36284 - DNA, 21 bp, Homo sapiens
acatcactacytgtatattat

SEQ ID NO: 36285 - DNA, 21 bp, Homo sapiens
ataccttaagkaaaatgtgtg

SEQ ID NO: 36286 - DNA, 21 bp, Homo sapiens
ctcaaatctayaaaaggagaa

SEQ ID NO: 36287 - DNA, 21 bp, Homo sapiens
gtatgtaacamcttgaagaaa

SEQ ID NO: 36288 - DNA, 21 bp, Homo sapiens
tctttgaacaycacaccagag

SEQ ID NO: 36289 - DNA, 21 bp, Homo sapiens
ttgaaaaccaytggggtagat

SEQ ID NO: 36290 - DNA, 21 bp, Homo sapiens
caggcatactrtagttaagaa

SEQ ID NO: 36291 - DNA, 21 bp, Homo sapiens
gatcagttaartgagggccag

SEQ ID NO: 36292 - DNA, 21 bp, Homo sapiens
gccagtcatakctctccaggc

SEQ ID NO: 36293 - DNA, 21 bp, Homo sapiens
aaaatttcaarcaaacatgat

SEQ ID NO: 36294 - DNA, 21 bp, Homo sapiens
tgtgtacctcrttccccagta

SEQ ID NO: 36295 - DNA, 21 bp, Homo sapiens
tgatcatgccyagatgttcct

SEQ ID NO: 36296 - DNA, 21 bp, Homo sapiens
aacatttgccrgttacacaat

SEQ ID NO: 36297 - DNA, 21 bp, Homo sapiens
atttggaaagrggtggagaag

SEQ ID NO: 36298 - DNA, 21 bp, Homo sapiens
aataagaatasttcaggctcc

SEQ ID NO: 36299 - DNA, 21 bp, Homo sapiens
aaataggggcrcaagagcaca

SEQ ID NO: 36300 - DNA, 21 bp, Homo sapiens
cgttcataaarcagaagctat

SEQ ID NO: 36301 - DNA, 21 bp, Homo sapiens
ggaattttgcyttttattctc

SEQ ID NO: 36302 - DNA, 21 bp, Homo sapiens
tcaagagtatsttcgtaatca

SEQ ID NO: 36303 - DNA, 21 bp, Homo sapiens
aacatcctatktacctttttc

SEQ ID NO: 36304 - DNA, 21 bp, Homo sapiens
tgtcttaagtwatttctggaa

SEQ ID NO: 36305 - DNA, 21 bp, Homo sapiens
tgctataaaaygtctaggcat

SEQ ID NO: 36306 - DNA, 21 bp, Homo sapiens
tgacttatgayaccttagcaa

SEQ ID NO: 36307 - DNA, 21 bp, Homo sapiens
gggacgaggtstaaagccttt

SEQ ID NO: 36308 - DNA, 21 bp, Homo sapiens
tagatttcttmcaattactga

SEQ ID NO: 36309 - DNA, 21 bp, Homo sapiens
agaatttaaawtggtgtccat

SEQ ID NO: 36310 - DNA, 21 bp, Homo sapiens
ggtctgcactytgagtttatt

SEQ ID NO: 36311 - DNA, 21 bp, Homo sapiens
tgattactaayctagagacct

SEQ ID NO: 36312 - DNA, 21 bp, Homo sapiens
gatttggcagraaatgcttct

SEQ ID NO: 36313 - DNA, 21 bp, Homo sapiens
tgccatagtgkgtatccttta

SEQ ID NO: 36314 - DNA, 21 bp, Homo sapiens
tcaaaggaatyttctgagtga

SEQ ID NO: 36315 - DNA, 21 bp, Homo sapiens
ctatatcttcwtaaaggttcc

SEQ ID NO: 36316 - DNA, 21 bp, Homo sapiens
tggcccctacytgcctgttat

SEQ ID NO: 36317 - DNA, 21 bp, Homo sapiens
gtatgcttcaraacaacataa

SEQ ID NO: 36318 - DNA, 21 bp, Homo sapiens
tgtgagatagyccgttgctcc

SEQ ID NO: 36319 - DNA, 21 bp, Homo sapiens
ttagtaagtgrtagaatctag

SEQ ID NO: 36320 - DNA, 21 bp, Homo sapiens
tgatcctcgtktgtggctgat

SEQ ID NO: 36321 - DNA, 21 bp, Homo sapiens
agtttattacyatgcttgtag

SEQ ID NO: 36322 - DNA, 21 bp, Homo sapiens
tcgtcacacaktttacaagtt

SEQ ID NO: 36323 - DNA, 21 bp, Homo sapiens
atctggacctragcatagttc

SEQ ID NO: 36324 - DNA, 21 bp, Homo sapiens
aaaatagatcrttattgcaca

SEQ ID NO: 36325 - DNA, 21 bp, Homo sapiens
caggctccagstatggctaca

SEQ ID NO: 36326 - DNA, 21 bp, Homo sapiens
ggtccaaaagkcttctttcag

SEQ ID NO: 36327 - DNA, 21 bp, Homo sapiens
atgtattttartctgtttgat

SEQ ID NO: 36328 - DNA, 21 bp, Homo sapiens
gattgttttawcaggaagtta

SEQ ID NO: 36329 - DNA, 21 bp, Homo sapiens
ctttcaaattytagctcaaga

SEQ ID NO: 36330 - DNA, 21 bp, Homo sapiens
aaatcaaagaytgaatgtcaa

SEQ ID NO: 36331 - DNA, 21 bp, Homo sapiens
gagcacggagyagcccgtgtg

SEQ ID NO: 36332 - DNA, 21 bp, Homo sapiens
agaatacactkgaagggttca

SEQ ID NO: 36333 - DNA, 21 bp, Homo sapiens
tttcttgatgrtttaaaatag

SEQ ID NO: 36334 - DNA, 21 bp, Homo sapiens
acacttttacsctagtccatg

SEQ ID NO: 36335 - DNA, 21 bp, Homo sapiens
gatccttctaygtaaatattc

SEQ ID NO: 36336 - DNA, 21 bp, Homo sapiens
agggctcacayggagattgga

SEQ ID NO: 36337 - DNA, 21 bp, Homo sapiens
acttttcaccrttggttatat

SEQ ID NO: 36338 - DNA, 21 bp, Homo sapiens
attgacttacmcacactatag

SEQ ID NO: 36339 - DNA, 21 bp, Homo sapiens
cctatagcctkaatcagcttg

SEQ ID NO: 36340 - DNA, 21 bp, Homo sapiens
tttctttttgwgataattggc

SEQ ID NO: 36341 - DNA, 21 bp, Homo sapiens
attcatactcrttggtaatat

SEQ ID NO: 36342 - DNA, 21 bp, Homo sapiens
taagtatatawgaaagtactc

SEQ ID NO: 36343 - DNA, 21 bp, Homo sapiens
catctcagagmctaattttga

SEQ ID NO: 36344 - DNA, 21 bp, Homo sapiens
attatggaacmctttaaggtc

SEQ ID NO: 36345 - DNA, 21 bp, Homo sapiens
gacattcgccwagtctgtgtg

SEQ ID NO: 36346 - DNA, 21 bp, Homo sapiens
ctcattttcaratacacttag

SEQ ID NO: 36347 - DNA, 21 bp, Homo sapiens
aaacaatagtracataccttt

SEQ ID NO: 36348 - DNA, 21 bp, Homo sapiens
tatggttatgmaagatgtgaa

SEQ ID NO: 36349 - DNA, 21 bp, Homo sapiens
gtgaatatgargttggggatc

SEQ ID NO: 36350 - DNA, 21 bp, Homo sapiens
cactttttttyctgtaggttt

SEQ ID NO: 36351 - DNA, 21 bp, Homo sapiens
acagacataarttattgagta

SEQ ID NO: 36352 - DNA, 21 bp, Homo sapiens
gatatcaccayagatgtgcaa

SEQ ID NO: 36353 - DNA, 21 bp, Homo sapiens
gccatttaaawttttagcaga

SEQ ID NO: 36354 - DNA, 21 bp, Homo sapiens
ttgattactayaaactatgcc

SEQ ID NO: 36355 - DNA, 21 bp, Homo sapiens
ttcttaaacakcttcctctga

SEQ ID NO: 36356 - DNA, 21 bp, Homo sapiens
acttcaactaytatgcatgtg

SEQ ID NO: 36357 - DNA, 21 bp, Homo sapiens
ggactcactamtaatactata

SEQ ID NO: 36358 - DNA, 21 bp, Homo sapiens
tagatcaacawattgaaaagt

SEQ ID NO: 36359 - DNA, 21 bp, Homo sapiens
agctctgttcygtttaaatta

SEQ ID NO: 36360 - DNA, 21 bp, Homo sapiens
tggaacaataktgcagtctat

SEQ ID NO: 36361 - DNA, 21 bp, Homo sapiens
catagatagawgataggtaga

SEQ ID NO: 36362 - DNA, 21 bp, Homo sapiens
ttgtgctgagmaaaatagtaa

SEQ ID NO: 36363 - DNA, 21 bp, Homo sapiens
gattataaacrcaagatatta

SEQ ID NO: 36364 - DNA, 21 bp, Homo sapiens
atgtgagcccrtaatttgtta

SEQ ID NO: 36365 - DNA, 21 bp, Homo sapiens
cattaaagcaygtcaggagaa

SEQ ID NO: 36366 - DNA, 21 bp, Homo sapiens
ttgtagtgtayctctgcaggt

SEQ ID NO: 36367 - DNA, 21 bp, Homo sapiens
catgccccaamtatgagagcc

SEQ ID NO: 36368 - DNA, 21 bp, Homo sapiens
tactactttcscttaacaagg

SEQ ID NO: 36369 - DNA, 21 bp, Homo sapiens
tgaaagagacrgagtctaaga

SEQ ID NO: 36370 - DNA, 21 bp, Homo sapiens
ggatattggcstgaagatgta

SEQ ID NO: 36371 - DNA, 21 bp, Homo sapiens
acttacatgaraattcagagt

SEQ ID NO: 36372 - DNA, 21 bp, Homo sapiens
cctttccctcrtatcctttct

SEQ ID NO: 36373 - DNA, 21 bp, Homo sapiens
tataatctggrggcaatgata

SEQ ID NO: 36374 - DNA, 21 bp, Homo sapiens
agacacttagrcattttttaa

SEQ ID NO: 36375 - DNA, 21 bp, Homo sapiens
aaaatgtaacyaggctgggtg

SEQ ID NO: 36376 - DNA, 21 bp, Homo sapiens
catgcagtcaytacatgaaac

SEQ ID NO: 36377 - DNA, 21 bp, Homo sapiens
cgtaactattycataaaaata

SEQ ID NO: 36378 - DNA, 21 bp, Homo sapiens
aacaaagagtyccatcctgtt

SEQ ID NO: 36379 - DNA, 21 bp, Homo sapiens
gctatgccccrtcaaaggtca

SEQ ID NO: 36380 - DNA, 21 bp, Homo sapiens
ccatataccaygatcgttgcc

SEQ ID NO: 36381 - DNA, 21 bp, Homo sapiens
atattaacacragagtatgta

SEQ ID NO: 36382 - DNA, 21 bp, Homo sapiens
tagaaggacasggtaaggaga

SEQ ID NO: 36383 - DNA, 21 bp, Homo sapiens
tattggagtgytccctttcgg

SEQ ID NO: 36384 - DNA, 21 bp, Homo sapiens
acatgtgaacmcttatgtcag

SEQ ID NO: 36385 - DNA, 21 bp, Homo sapiens
ataattacaawctttattcag

SEQ ID NO: 36386 - DNA, 21 bp, Homo sapiens
ataaagttatygataaggatt

SEQ ID NO: 36387 - DNA, 21 bp, Homo sapiens
atgaaccactraaaagtttcc

SEQ ID NO: 36388 - DNA, 21 bp, Homo sapiens
atatgaccaaraatattacat

SEQ ID NO: 36389 - DNA, 21 bp, Homo sapiens
aacatggagaktagagaatta

SEQ ID NO: 36390 - DNA, 21 bp, Homo sapiens
ccctttccacrctcctcatta

SEQ ID NO: 36391 - DNA, 21 bp, Homo sapiens
agccaataatrcaaataagtt

SEQ ID NO: 36392 - DNA, 21 bp, Homo sapiens
ggacaaacctrtgttttcaac

SEQ ID NO: 36393 - DNA, 21 bp, Homo sapiens
agtgcaaagcstcttagaatc

SEQ ID NO: 36394 - DNA, 21 bp, Homo sapiens
ctgaagatttstgtcaatgtt

SEQ ID NO: 36395 - DNA, 21 bp, Homo sapiens
ttagttgtctstctcctttac

SEQ ID NO: 36396 - DNA, 21 bp, Homo sapiens
ttgcaaatttmaaatttctac

SEQ ID NO: 36397 - DNA, 21 bp, Homo sapiens
tttgggcattraagagttatt

SEQ ID NO: 36398 - DNA, 21 bp, Homo sapiens
gtgaggtcacrgctggagata

SEQ ID NO: 36399 - DNA, 21 bp, Homo sapiens
atcagtgcttsaagcttagcg

SEQ ID NO: 36400 - DNA, 21 bp, Homo sapiens
ggttaagggaygactgtgttg

SEQ ID NO: 36401 - DNA, 21 bp, Homo sapiens
cagaatgggcyggatggtgac

SEQ ID NO: 36402 - DNA, 21 bp, Homo sapiens
taggaaatcgrggatttgatg

SEQ ID NO: 36403 - DNA, 21 bp, Homo sapiens
gttatgaaacmgtatcagcac

SEQ ID NO: 36404 - DNA, 21 bp, Homo sapiens
accatacttcrccctgctgcc

SEQ ID NO: 36405 - DNA, 21 bp, Homo sapiens
ggatgctgtcsggacatgtca

SEQ ID NO: 36406 - DNA, 21 bp, Homo sapiens
tatttatgtakgtatctatgt

SEQ ID NO: 36407 - DNA, 21 bp, Homo sapiens
gcagcgctggrggccctgggt

SEQ ID NO: 36408 - DNA, 21 bp, Homo sapiens
aggatttcttrgtttctccat

SEQ ID NO: 36409 - DNA, 21 bp, Homo sapiens
gtcatttaatsgtacgtcatc

SEQ ID NO: 36410 - DNA, 21 bp, Homo sapiens
tccagtaacgrggaaacgtca

SEQ ID NO: 36411 - DNA, 21 bp, Homo sapiens
tcttaccctcrtgaagctata

SEQ ID NO: 36412 - DNA, 21 bp, Homo sapiens
tgttgctgctrccttggggcc

SEQ ID NO: 36413 - DNA, 21 bp, Homo sapiens
agcttctgtcstttgaaggtt

SEQ ID NO: 36414 - DNA, 21 bp, Homo sapiens
gctagcagggkccgcctctac

SEQ ID NO: 36415 - DNA, 21 bp, Homo sapiens
caaaaatgctrccagcctgtc

SEQ ID NO: 36416 - DNA, 21 bp, Homo sapiens
ccacagtgccrtgtctcggga

SEQ ID NO: 36417 - DNA, 21 bp, Homo sapiens
tcctacagatmctcgatggtt

SEQ ID NO: 36418 - DNA, 21 bp, Homo sapiens
tcaaaacaaarggccagtaag

SEQ ID NO: 36419 - DNA, 21 bp, Homo sapiens
ggtggtttgaygtaagccaca

SEQ ID NO: 36420 - DNA, 21 bp, Homo sapiens
ggccaagcccrgagtcaaatg

SEQ ID NO: 36421 - DNA, 21 bp, Homo sapiens
tgctttcatasgtacatactt

SEQ ID NO: 36422 - DNA, 21 bp, Homo sapiens
tgccagggaaygaacctgatt

SEQ ID NO: 36423 - DNA, 21 bp, Homo sapiens
ctcaagttccmagtctacaga

SEQ ID NO: 36424 - DNA, 21 bp, Homo sapiens
ctccatgtgtrtaatctcatg

SEQ ID NO: 36425 - DNA, 21 bp, Homo sapiens
ttacctgtttrtaagtctcat

SEQ ID NO: 36426 - DNA, 21 bp, Homo sapiens
cagacggaggyacaagggttg

SEQ ID NO: 36427 - DNA, 21 bp, Homo sapiens
ccatagacacsaaaatatcaa

SEQ ID NO: 36428 - DNA, 21 bp, Homo sapiens
gtaaacgattkccataagata

SEQ ID NO: 36429 - DNA, 21 bp, Homo sapiens
aagacagcaaytggggctgcc

SEQ ID NO: 36430 - DNA, 21 bp, Homo sapiens
ccttatcctcsgttctgaggg

SEQ ID NO: 36431 - DNA, 21 bp, Homo sapiens
gaatacagtartaattgtcct

SEQ ID NO: 36432 - DNA, 21 bp, Homo sapiens
tgttgaatttmataatcagac

SEQ ID NO: 36433 - DNA, 21 bp, Homo sapiens
tctgggagtgkcttagtgatg

SEQ ID NO: 36434 - DNA, 21 bp, Homo sapiens
gcaggaaaggycgtctgtcca

SEQ ID NO: 36435 - DNA, 21 bp, Homo sapiens
cctgttcattytgagcttctt

SEQ ID NO: 36436 - DNA, 21 bp, Homo sapiens
tagcactgccsaatgattgcc

SEQ ID NO: 36437 - DNA, 21 bp, Homo sapiens
gttatcttgcyaacattaact

SEQ ID NO: 36438 - DNA, 21 bp, Homo sapiens
accatcacaayttaaaaggcc

SEQ ID NO: 36439 - DNA, 21 bp, Homo sapiens
aatattttacmactcacactt

SEQ ID NO: 36440 - DNA, 21 bp, Homo sapiens
gcatccctaargaaatgagta

SEQ ID NO: 36441 - DNA, 21 bp, Homo sapiens
aaaggtctacytctaagtcaa

SEQ ID NO: 36442 - DNA, 21 bp, Homo sapiens
aagccaccatyataggcagaa

SEQ ID NO: 36443 - DNA, 21 bp, Homo sapiens
taccaataacrttctggtggg

SEQ ID NO: 36444 - DNA, 21 bp, Homo sapiens
gcacacaaaaygcatctgtgt

SEQ ID NO: 36445 - DNA, 21 bp, Homo sapiens
gtttgtggackgagtttctgc

SEQ ID NO: 36446 - DNA, 21 bp, Homo sapiens
tgcttcaatgkaaggttctaa

SEQ ID NO: 36447 - DNA, 21 bp, Homo sapiens
gtcatggagcrctgattgagt

SEQ ID NO: 36448 - DNA, 21 bp, Homo sapiens
tctgtaaaccrtcataatttg

SEQ ID NO: 36449 - DNA, 21 bp, Homo sapiens
cagtttgagarccacagcctt

SEQ ID NO: 36450 - DNA, 21 bp, Homo sapiens
ccttgtcttaygtatggccag

SEQ ID NO: 36451 - DNA, 21 bp, Homo sapiens
aaaactagaaytgatttcctg

SEQ ID NO: 36452 - DNA, 21 bp, Homo sapiens
aaaaggatctkatatcggtat

SEQ ID NO: 36453 - DNA, 21 bp, Homo sapiens
gaaaactggartatgtacatg

SEQ ID NO: 36454 - DNA, 21 bp, Homo sapiens
atgaggaaagsagaagagaca

SEQ ID NO: 36455 - DNA, 21 bp, Homo sapiens
tatcccatttkatagaagaga

SEQ ID NO: 36456 - DNA, 21 bp, Homo sapiens
cacagtatttyaaaggaaaaa

SEQ ID NO: 36457 - DNA, 21 bp, Homo sapiens
ttattcctttracgtgtgttc

SEQ ID NO: 36458 - DNA, 21 bp, Homo sapiens
ggccatgcagmggaataggca

SEQ ID NO: 36459 - DNA, 21 bp, Homo sapiens
tcctaactccmagtttcatac

SEQ ID NO: 36460 - DNA, 21 bp, Homo sapiens
gattttttcgraaattctgct

SEQ ID NO: 36461 - DNA, 21 bp, Homo sapiens
tcagccacacktggtaatttt

SEQ ID NO: 36462 - DNA, 21 bp, Homo sapiens
tccagaggtakaaaacaaaaa

SEQ ID NO: 36463 - DNA, 21 bp, Homo sapiens
atcaagagtcrgacagtgagg

SEQ ID NO: 36464 - DNA, 21 bp, Homo sapiens
ggtggttaagrgtcgtttgat

SEQ ID NO: 36465 - DNA, 21 bp, Homo sapiens
caacttctagsgatagcactt

SEQ ID NO: 36466 - DNA, 21 bp, Homo sapiens
attcatagggraaaaacggag

SEQ ID NO: 36467 - DNA, 21 bp, Homo sapiens
catatttgctsaaagaacaaa

SEQ ID NO: 36468 - DNA, 21 bp, Homo sapiens
atctctcagcrgaatctggat

SEQ ID NO: 36469 - DNA, 21 bp, Homo sapiens
caaacaatatrcaaggctgta

SEQ ID NO: 36470 - DNA, 21 bp, Homo sapiens
ccatgtacacrcatatggttt

SEQ ID NO: 36471 - DNA, 21 bp, Homo sapiens
gtaaaatttgygttaccagta

SEQ ID NO: 36472 - DNA, 21 bp, Homo sapiens
atggcctagasaaaacttagt

SEQ ID NO: 36473 - DNA, 21 bp, Homo sapiens
tgatgcccacrtggctttttt

SEQ ID NO: 36474 - DNA, 21 bp, Homo sapiens
agcctctccaytaggatgttc

SEQ ID NO: 36475 - DNA, 21 bp, Homo sapiens
aaggatttccyactgagcaga

SEQ ID NO: 36476 - DNA, 21 bp, Homo sapiens
gtctgtccttrtttagtaatc

SEQ ID NO: 36477 - DNA, 21 bp, Homo sapiens
gaacatagaayttgtatccag

SEQ ID NO: 36478 - DNA, 21 bp, Homo sapiens
attaaggtacyagtgttgatt

SEQ ID NO: 36479 - DNA, 21 bp, Homo sapiens
ttcaaattttktggtctgtac

SEQ ID NO: 36480 - DNA, 21 bp, Homo sapiens
gtctggagctsggttggatga

SEQ ID NO: 36481 - DNA, 21 bp, Homo sapiens
ttggagccagsgtttcctcag

SEQ ID NO: 36482 - DNA, 21 bp, Homo sapiens
agcaaaaccaygcccacagta

SEQ ID NO: 36483 - DNA, 21 bp, Homo sapiens
acacctcttcyttggagtcag

SEQ ID NO: 36484 - DNA, 21 bp, Homo sapiens
ctgtgtaacamaacagaatca

SEQ ID NO: 36485 - DNA, 21 bp, Homo sapiens
ggccaacgacrtatgcccggt

SEQ ID NO: 36486 - DNA, 21 bp, Homo sapiens
gtcatcctttrgctaggacat

SEQ ID NO: 36487 - DNA, 21 bp, Homo sapiens
tccaagcctaytgggacactg

SEQ ID NO: 36488 - DNA, 21 bp, Homo sapiens
acgctctcaayttgtgtcctc

SEQ ID NO: 36489 - DNA, 21 bp, Homo sapiens
gcccgcggttkccagtcctct

SEQ ID NO: 36490 - DNA, 21 bp, Homo sapiens
gcctattcatrtaacttcaaa

SEQ ID NO: 36491 - DNA, 21 bp, Homo sapiens
gtacagaaacragctgggagg

SEQ ID NO: 36492 - DNA, 21 bp, Homo sapiens
ccttcaaccargtaacataat

SEQ ID NO: 36493 - DNA, 21 bp, Homo sapiens
ctccatttttmagccctctgc

SEQ ID NO: 36494 - DNA, 21 bp, Homo sapiens
gttggttgtgkaaatacccaa

SEQ ID NO: 36495 - DNA, 21 bp, Homo sapiens
acatttctgarcctataccct

SEQ ID NO: 36496 - DNA, 21 bp, Homo sapiens
gatgcagaaaygtctttaaca

SEQ ID NO: 36497 - DNA, 21 bp, Homo sapiens
tgtacatactyctaaaggtaa

SEQ ID NO: 36498 - DNA, 21 bp, Homo sapiens
ccttatgcatrtctatatcca

SEQ ID NO: 36499 - DNA, 21 bp, Homo sapiens
gtacaaacatyttctaatata

SEQ ID NO: 36500 - DNA, 21 bp, Homo sapiens
cacaaaagggrtcagggtatt

SEQ ID NO: 36501 - DNA, 21 bp, Homo sapiens
cagccaggcayatcctaactg

SEQ ID NO: 36502 - DNA, 21 bp, Homo sapiens
aatactttttytcagagagca

SEQ ID NO: 36503 - DNA, 21 bp, Homo sapiens
aagaacttatytgctggaaaa

SEQ ID NO: 36504 - DNA, 21 bp, Homo sapiens
tatgtggcaayaaatggtgga

SEQ ID NO: 36505 - DNA, 21 bp, Homo sapiens
aaggagggaarccaataaaga

SEQ ID NO: 36506 - DNA, 21 bp, Homo sapiens
tgatctacttraactttaccc

SEQ ID NO: 36507 - DNA, 21 bp, Homo sapiens
acctttgactrgataagaaga

SEQ ID NO: 36508 - DNA, 21 bp, Homo sapiens
cttacttgttytctttgcagt

SEQ ID NO: 36509 - DNA, 21 bp, Homo sapiens
gtattgagtgraatcgtcttc

SEQ ID NO: 36510 - DNA, 21 bp, Homo sapiens
caaaatgcaasccagtatcag

SEQ ID NO: 36511 - DNA, 21 bp, Homo sapiens
cagttagccarttttttttag

SEQ ID NO: 36512 - DNA, 21 bp, Homo sapiens
tttaacagccrcgcagcagag

SEQ ID NO: 36513 - DNA, 21 bp, Homo sapiens
aggtattgccrccaaagaggc

SEQ ID NO: 36514 - DNA, 21 bp, Homo sapiens
aggaaactggmgtccaggctg

SEQ ID NO: 36515 - DNA, 21 bp, Homo sapiens
actgaaggctmtgaatattct

SEQ ID NO: 36516 - DNA, 21 bp, Homo sapiens
gaatcttcttyggaatgtcat

SEQ ID NO: 36517 - DNA, 21 bp, Homo sapiens
ctgtgctgtgsaaggcctcat

SEQ ID NO: 36518 - DNA, 21 bp, Homo sapiens
atgccccagcrtgtcaaaata

SEQ ID NO: 36519 - DNA, 21 bp, Homo sapiens
gcatgagctcsttagacactg

SEQ ID NO: 36520 - DNA, 21 bp, Homo sapiens
agcttcaacastgtgagtttc

SEQ ID NO: 36521 - DNA, 21 bp, Homo sapiens
atgtaactccytgctaaggct

SEQ ID NO: 36522 - DNA, 21 bp, Homo sapiens
cagatttttayttttggggtg

SEQ ID NO: 36523 - DNA, 21 bp, Homo sapiens
gctgcagtttkaggagttaac

SEQ ID NO: 36524 - DNA, 21 bp, Homo sapiens
ggcactctctrcattaccctt

SEQ ID NO: 36525 - DNA, 21 bp, Homo sapiens
catccaggtcragaaattcat

SEQ ID NO: 36526 - DNA, 21 bp, Homo sapiens
aagaaactcaratagttcctt

SEQ ID NO: 36527 - DNA, 21 bp, Homo sapiens
tgaacgttttmccctacagga

SEQ ID NO: 36528 - DNA, 21 bp, Homo sapiens
gaaatgatgcygaaaattcag

SEQ ID NO: 36529 - DNA, 21 bp, Homo sapiens
actcatctacrgaatggaaga

SEQ ID NO: 36530 - DNA, 21 bp, Homo sapiens
atcaggcaggmaggtagcatt

SEQ ID NO: 36531 - DNA, 21 bp, Homo sapiens
aagaagagacmatcaaaaaag

SEQ ID NO: 36532 - DNA, 21 bp, Homo sapiens
catgcctttastcacagagag

SEQ ID NO: 36533 - DNA, 21 bp, Homo sapiens
tagtaaagttmtgagagattt

SEQ ID NO: 36534 - DNA, 21 bp, Homo sapiens
cttcctcctgrtgttcaattc

SEQ ID NO: 36535 - DNA, 21 bp, Homo sapiens
agcaggtctcrtaagtactga

SEQ ID NO: 36536 - DNA, 21 bp, Homo sapiens
cggtgcttatygtttatacag

SEQ ID NO: 36537 - DNA, 21 bp, Homo sapiens
gaattgtgcartatgaacgaa

SEQ ID NO: 36538 - DNA, 21 bp, Homo sapiens
cagctgaattwtaacaatgct

SEQ ID NO: 36539 - DNA, 21 bp, Homo sapiens
gattgtaccgytgagcttttc

SEQ ID NO: 36540 - DNA, 21 bp, Homo sapiens
ctttatccagyttgtatttct

SEQ ID NO: 36541 - DNA, 21 bp, Homo sapiens
cttgttgttaktccaaagagg

SEQ ID NO: 36542 - DNA, 21 bp, Homo sapiens
gcagatatgckttgaatggat

SEQ ID NO: 36543 - DNA, 21 bp, Homo sapiens
ctctcgtagaraaggacccat

SEQ ID NO: 36544 - DNA, 21 bp, Homo sapiens
aactaaaaaaytacaggtgtt

SEQ ID NO: 36545 - DNA, 21 bp, Homo sapiens
gtgaagcaatytgttgttctg

SEQ ID NO: 36546 - DNA, 21 bp, Homo sapiens
tatggagagtrtagcaggagg

SEQ ID NO: 36547 - DNA, 21 bp, Homo sapiens
gggtgatcacrgagcaatact

SEQ ID NO: 36548 - DNA, 21 bp, Homo sapiens
tttcaaatcarttaagctcct

SEQ ID NO: 36549 - DNA, 21 bp, Homo sapiens
tgtaggaatcragaagagtcc

SEQ ID NO: 36550 - DNA, 21 bp, Homo sapiens
aatggcctccmcggagagctc

SEQ ID NO: 36551 - DNA, 21 bp, Homo sapiens
ataatcctatycccttcaaaa

SEQ ID NO: 36552 - DNA, 21 bp, Homo sapiens
attttaattcraagtacattt

SEQ ID NO: 36553 - DNA, 21 bp, Homo sapiens
cacaaaatacrgatagtttca

SEQ ID NO: 36554 - DNA, 21 bp, Homo sapiens
gactttctccwtgttaaaata

SEQ ID NO: 36555 - DNA, 21 bp, Homo sapiens
aagagtcattrtatttcttac

SEQ ID NO: 36556 - DNA, 21 bp, Homo sapiens
aagtttgccaraggtggtgct

SEQ ID NO: 36557 - DNA, 21 bp, Homo sapiens
tcttcaccagsaaagggatta

SEQ ID NO: 36558 - DNA, 21 bp, Homo sapiens
taaaccgaccrtatctttcga

SEQ ID NO: 36559 - DNA, 21 bp, Homo sapiens
aattttctcarcctgatgagg

SEQ ID NO: 36560 - DNA, 21 bp, Homo sapiens
taatgcatgtyctaaattcat

SEQ ID NO: 36561 - DNA, 21 bp, Homo sapiens
tatttttaaascatgttatac

SEQ ID NO: 36562 - DNA, 21 bp, Homo sapiens
ttgcagatacrgaaagtaagg

SEQ ID NO: 36563 - DNA, 21 bp, Homo sapiens
ttgtagagcaygaactatgtg

SEQ ID NO: 36564 - DNA, 21 bp, Homo sapiens
ataattaataygctaaaaact

SEQ ID NO: 36565 - DNA, 21 bp, Homo sapiens
aaagctctatragcacggact

SEQ ID NO: 36566 - DNA, 21 bp, Homo sapiens
tctctaagcarcacaggcaaa

SEQ ID NO: 36567 - DNA, 21 bp, Homo sapiens
actgagagcayattgtatatc

SEQ ID NO: 36568 - DNA, 21 bp, Homo sapiens
aaaaattatcrtctcagtagt

SEQ ID NO: 36569 - DNA, 21 bp, Homo sapiens
tcatttttccrtcttcagaag

SEQ ID NO: 36570 - DNA, 21 bp, Homo sapiens
ttactctcaaygtagtttcac

SEQ ID NO: 36571 - DNA, 21 bp, Homo sapiens
accatgtgagyatgaatttac

SEQ ID NO: 36572 - DNA, 21 bp, Homo sapiens
aaagtccattratctctatac

SEQ ID NO: 36573 - DNA, 21 bp, Homo sapiens
gcaactggcawctagtaaaag

SEQ ID NO: 36574 - DNA, 21 bp, Homo sapiens
aaattttcccrgtgcttctaa

SEQ ID NO: 36575 - DNA, 21 bp, Homo sapiens
tcaatggtaawtagtaggtct

SEQ ID NO: 36576 - DNA, 21 bp, Homo sapiens
atttaaacgtraaattatgag

SEQ ID NO: 36577 - DNA, 21 bp, Homo sapiens
tctagggtatktgtccccaag

SEQ ID NO: 36578 - DNA, 21 bp, Homo sapiens
tggtaggctcrtaagtagatt

SEQ ID NO: 36579 - DNA, 21 bp, Homo sapiens
gtcaaagtctyatgtgtcatg

SEQ ID NO: 36580 - DNA, 21 bp, Homo sapiens
atattggcttstctagttcta

SEQ ID NO: 36581 - DNA, 21 bp, Homo sapiens
ctgtcctcccrtgtaatgaat

SEQ ID NO: 36582 - DNA, 21 bp, Homo sapiens
ttagagctagsaaattataga

SEQ ID NO: 36583 - DNA, 21 bp, Homo sapiens
ataaaccatayaagcattaca

SEQ ID NO: 36584 - DNA, 21 bp, Homo sapiens
gtttacagacrttgcaattta

SEQ ID NO: 36585 - DNA, 21 bp, Homo sapiens
ttttatctgayggacttgaga

SEQ ID NO: 36586 - DNA, 21 bp, Homo sapiens
ctttgatcctyacagcactgg

SEQ ID NO: 36587 - DNA, 21 bp, Homo sapiens
gaatgcctagrtatcataaat

SEQ ID NO: 36588 - DNA, 21 bp, Homo sapiens
cacaccgtgcrtgagaatagg

SEQ ID NO: 36589 - DNA, 21 bp, Homo sapiens
tttgtggcctmtgcctatata

SEQ ID NO: 36590 - DNA, 21 bp, Homo sapiens
acaggcagttytagttttatc

SEQ ID NO: 36591 - DNA, 21 bp, Homo sapiens
cttttaacagwtgctttataa

SEQ ID NO: 36592 - DNA, 21 bp, Homo sapiens
gaaactaaggrtggcagttac

SEQ ID NO: 36593 - DNA, 21 bp, Homo sapiens
cagctcttcayacatttgcaa

SEQ ID NO: 36594 - DNA, 21 bp, Homo sapiens
tgagactcatyccttttactg

SEQ ID NO: 36595 - DNA, 21 bp, Homo sapiens
taatgttcacrggcttcttca

SEQ ID NO: 36596 - DNA, 21 bp, Homo sapiens
ctgggtattgyggctgattat

SEQ ID NO: 36597 - DNA, 21 bp, Homo sapiens
gtatattcaarttgtaaaaat

SEQ ID NO: 36598 - DNA, 21 bp, Homo sapiens
aagcaagaggyttctaaatga

SEQ ID NO: 36599 - DNA, 21 bp, Homo sapiens
aacagctactkactctgaatg

SEQ ID NO: 36600 - DNA, 21 bp, Homo sapiens
ccaaggaacaygatttagggt

SEQ ID NO: 36601 - DNA, 21 bp, Homo sapiens
atgtaatgttsttgttataat

SEQ ID NO: 36602 - DNA, 21 bp, Homo sapiens
agtatgagaawctgctaaagg

SEQ ID NO: 36603 - DNA, 21 bp, Homo sapiens
gattcgacgtsagaagatgtc

SEQ ID NO: 36604 - DNA, 21 bp, Homo sapiens
tactaaccctrtagtttattg

SEQ ID NO: 36605 - DNA, 21 bp, Homo sapiens
ttttttttgtrtcaatgaggc

SEQ ID NO: 36606 - DNA, 21 bp, Homo sapiens
tgtgtgcaccytcaccagtgt

SEQ ID NO: 36607 - DNA, 21 bp, Homo sapiens
gcatagaatcmctttttaaaa

SEQ ID NO: 36608 - DNA, 21 bp, Homo sapiens
cagatttttgycattaaagag

SEQ ID NO: 36609 - DNA, 21 bp, Homo sapiens
acatccaactrtgctcccatt

SEQ ID NO: 36610 - DNA, 21 bp, Homo sapiens
ttaatgtccartgatattttt

SEQ ID NO: 36611 - DNA, 21 bp, Homo sapiens
gtccttccaastctcactccg

SEQ ID NO: 36612 - DNA, 21 bp, Homo sapiens
acatcacagakaatttgttgg

SEQ ID NO: 36613 - DNA, 21 bp, Homo sapiens
gtactgttctrggtttaggat

SEQ ID NO: 36614 - DNA, 21 bp, Homo sapiens
ttccaatgctkttagtggagt

SEQ ID NO: 36615 - DNA, 21 bp, Homo sapiens
tttcaggaacrccctctgagt

SEQ ID NO: 36616 - DNA, 21 bp, Homo sapiens
ttatttggttyctgcaattta

SEQ ID NO: 36617 - DNA, 21 bp, Homo sapiens
ctaagaagtayattggtccag

SEQ ID NO: 36618 - DNA, 21 bp, Homo sapiens
ggaatattgawgaaaaatcag

SEQ ID NO: 36619 - DNA, 21 bp, Homo sapiens
gtctctttaayttgtcccttg

SEQ ID NO: 36620 - DNA, 21 bp, Homo sapiens
gtgaaattacmttgctattaa

SEQ ID NO: 36621 - DNA, 21 bp, Homo sapiens
catattacacwgaacatatat

SEQ ID NO: 36622 - DNA, 21 bp, Homo sapiens
ctaacatactragaggtgtga

SEQ ID NO: 36623 - DNA, 21 bp, Homo sapiens
acccagaaacytctgaacttc

SEQ ID NO: 36624 - DNA, 21 bp, Homo sapiens
aatggttcttmgcagcaggta

SEQ ID NO: 36625 - DNA, 21 bp, Homo sapiens
gacattaatgmtttccaccac

SEQ ID NO: 36626 - DNA, 21 bp, Homo sapiens
tagatttgtasagcacagaag

SEQ ID NO: 36627 - DNA, 21 bp, Homo sapiens
cactatatgaytattaaacat

SEQ ID NO: 36628 - DNA, 21 bp, Homo sapiens
gtaaagcccamgttagattat

SEQ ID NO: 36629 - DNA, 21 bp, Homo sapiens
ttgtatgagtraacgaaagac

SEQ ID NO: 36630 - DNA, 21 bp, Homo sapiens
cgttggggtcygcgccctagg

SEQ ID NO: 36631 - DNA, 21 bp, Homo sapiens
tcttcttgccrtagagaaaat

SEQ ID NO: 36632 - DNA, 21 bp, Homo sapiens
agagctgaaayacagacccag

SEQ ID NO: 36633 - DNA, 21 bp, Homo sapiens
gactccagggwggtatcaaca

SEQ ID NO: 36634 - DNA, 21 bp, Homo sapiens
ctaaatttcargtctactcat

SEQ ID NO: 36635 - DNA, 21 bp, Homo sapiens
ataattccacygtgaaagtcc

SEQ ID NO: 36636 - DNA, 21 bp, Homo sapiens
ggtaaactcaygtcccagttt

SEQ ID NO: 36637 - DNA, 21 bp, Homo sapiens
gagcagctctsatagaggatg

SEQ ID NO: 36638 - DNA, 21 bp, Homo sapiens
ttggccttacygacccaggct

SEQ ID NO: 36639 - DNA, 21 bp, Homo sapiens
tctgtgtagcrtttcttccct

SEQ ID NO: 36640 - DNA, 21 bp, Homo sapiens
gggagcttttmgaaggttttg

SEQ ID NO: 36641 - DNA, 21 bp, Homo sapiens
tggtgtcgttstgatgttaac

SEQ ID NO: 36642 - DNA, 21 bp, Homo sapiens
ggtgggactaraaaatgtact

SEQ ID NO: 36643 - DNA, 21 bp, Homo sapiens
atctccctgtratctagatct

SEQ ID NO: 36644 - DNA, 21 bp, Homo sapiens
tgtttcctackcagctatttt

SEQ ID NO: 36645 - DNA, 21 bp, Homo sapiens
atttgcatacytgtgatattt

SEQ ID NO: 36646 - DNA, 21 bp, Homo sapiens
agtgttcagtwagtgaattga

SEQ ID NO: 36647 - DNA, 21 bp, Homo sapiens
aaatatatggstatgggaatt

SEQ ID NO: 36648 - DNA, 21 bp, Homo sapiens
agacatcactrtaaatctatc

SEQ ID NO: 36649 - DNA, 21 bp, Homo sapiens
ggcttcctgawcttgtgctga

SEQ ID NO: 36650 - DNA, 21 bp, Homo sapiens
gggagcttaamagattagcac

SEQ ID NO: 36651 - DNA, 21 bp, Homo sapiens
gtttcatataktcctgtcttc

SEQ ID NO: 36652 - DNA, 21 bp, Homo sapiens
aaaaaaaaaayctcagctagc

SEQ ID NO: 36653 - DNA, 21 bp, Homo sapiens
tttttgaatgyagcacataga

SEQ ID NO: 36654 - DNA, 21 bp, Homo sapiens
actacccattrctacattgtt

SEQ ID NO: 36655 - DNA, 21 bp, Homo sapiens
catcaatccarcgaaacctgc

SEQ ID NO: 36656 - DNA, 21 bp, Homo sapiens
agcatctgtayagttatcaag

SEQ ID NO: 36657 - DNA, 21 bp, Homo sapiens
atacctttggrcagcttatta

SEQ ID NO: 36658 - DNA, 21 bp, Homo sapiens
taactatgccrtataaaaatc

SEQ ID NO: 36659 - DNA, 21 bp, Homo sapiens
ctgtgttctgwcaggaagttt

SEQ ID NO: 36660 - DNA, 21 bp, Homo sapiens
tgctctaattrctattattca

SEQ ID NO: 36661 - DNA, 21 bp, Homo sapiens
cactctagacwatatagatat

SEQ ID NO: 36662 - DNA, 21 bp, Homo sapiens
cttgaattgtwtgttgtctcg

SEQ ID NO: 36663 - DNA, 21 bp, Homo sapiens
tcatttctacygctttcatca

SEQ ID NO: 36664 - DNA, 21 bp, Homo sapiens
gtgagggaccytcatgagctg

SEQ ID NO: 36665 - DNA, 21 bp, Homo sapiens
aagctagttgratacttatta

SEQ ID NO: 36666 - DNA, 21 bp, Homo sapiens
ctgggaaaggmacttcttttt

SEQ ID NO: 36667 - DNA, 21 bp, Homo sapiens
catgggttctrgatcttgctc

SEQ ID NO: 36668 - DNA, 21 bp, Homo sapiens
acatttttaayttgagttttg

SEQ ID NO: 36669 - DNA, 21 bp, Homo sapiens
cttgcatctgstaagacgtta

SEQ ID NO: 36670 - DNA, 21 bp, Homo sapiens
taataagtagygtggatataa

SEQ ID NO: 36671 - DNA, 21 bp, Homo sapiens
cacaataacawcttgggaata

SEQ ID NO: 36672 - DNA, 21 bp, Homo sapiens
attttgtcagytggatttctc

SEQ ID NO: 36673 - DNA, 21 bp, Homo sapiens
aacctgtaacrtgagagcact

SEQ ID NO: 36674 - DNA, 21 bp, Homo sapiens
cttagttaaaraggaaaagca

SEQ ID NO: 36675 - DNA, 21 bp, Homo sapiens
cctaaagagaraaaaatcaaa

SEQ ID NO: 36676 - DNA, 21 bp, Homo sapiens
tcttctttacyacaaggctac

SEQ ID NO: 36677 - DNA, 21 bp, Homo sapiens
atgttgaagcyagagaaagag

SEQ ID NO: 36678 - DNA, 21 bp, Homo sapiens
ccatcaatccrtattatttct

SEQ ID NO: 36679 - DNA, 21 bp, Homo sapiens
gcttttgaatktcttccctct

SEQ ID NO: 36680 - DNA, 21 bp, Homo sapiens
agctcttggcrgcagcagact

SEQ ID NO: 36681 - DNA, 21 bp, Homo sapiens
tgatatatgcmgcctactctc

SEQ ID NO: 36682 - DNA, 21 bp, Homo sapiens
agattcagackaacacagaag

SEQ ID NO: 36683 - DNA, 21 bp, Homo sapiens
cagatagactrgctagagtag

SEQ ID NO: 36684 - DNA, 21 bp, Homo sapiens
ggatcacagtrtttgaagctg

SEQ ID NO: 36685 - DNA, 21 bp, Homo sapiens
gctttctattktaaaagtcac

SEQ ID NO: 36686 - DNA, 21 bp, Homo sapiens
tgaaaggaagragccttattc

SEQ ID NO: 36687 - DNA, 21 bp, Homo sapiens
ctttccaacaycatacatggt

SEQ ID NO: 36688 - DNA, 21 bp, Homo sapiens
tttttgatcakttgtcctttt

SEQ ID NO: 36689 - DNA, 21 bp, Homo sapiens
gaacccagaaracaatattcc

SEQ ID NO: 36690 - DNA, 21 bp, Homo sapiens
aaaagcagtakggaggtcatt

SEQ ID NO: 36691 - DNA, 21 bp, Homo sapiens
tcataacccayggcggcttac

SEQ ID NO: 36692 - DNA, 21 bp, Homo sapiens
tgcattcatamtctattgtat

SEQ ID NO: 36693 - DNA, 21 bp, Homo sapiens
agaatagacayggattaacta

SEQ ID NO: 36694 - DNA, 21 bp, Homo sapiens
gcctgcggtcktcatctctgc

SEQ ID NO: 36695 - DNA, 21 bp, Homo sapiens
atctgctgccrttgatttcgg

SEQ ID NO: 36696 - DNA, 21 bp, Homo sapiens
ttccagattckgttcaaggat

SEQ ID NO: 36697 - DNA, 21 bp, Homo sapiens
ggacacctaaygggaaaaaca

SEQ ID NO: 36698 - DNA, 21 bp, Homo sapiens
ttatgtctctwgtttatctta

SEQ ID NO: 36699 - DNA, 21 bp, Homo sapiens
ttcctacaccstcttggctgg

SEQ ID NO: 36700 - DNA, 21 bp, Homo sapiens
attttgctcargtgtaacaaa

SEQ ID NO: 36701 - DNA, 21 bp, Homo sapiens
cagaccagaasagataagtaa

SEQ ID NO: 36702 - DNA, 21 bp, Homo sapiens
ggttcacagtrgaaatgctat

SEQ ID NO: 36703 - DNA, 21 bp, Homo sapiens
ttattactcayggtcggtagg

SEQ ID NO: 36704 - DNA, 21 bp, Homo sapiens
cctcccgtgcragtagggccc

SEQ ID NO: 36705 - DNA, 21 bp, Homo sapiens
caagagttagytgccggaagc

SEQ ID NO: 36706 - DNA, 21 bp, Homo sapiens
gtctttattcraatctctcct

SEQ ID NO: 36707 - DNA, 21 bp, Homo sapiens
tctttaacagkcacatcagca

SEQ ID NO: 36708 - DNA, 21 bp, Homo sapiens
agagggtcttyggtgtgattt

SEQ ID NO: 36709 - DNA, 21 bp, Homo sapiens
tcaaaaagctrgagaaacaat

SEQ ID NO: 36710 - DNA, 21 bp, Homo sapiens
acactcaaggraaggggattg

SEQ ID NO: 36711 - DNA, 21 bp, Homo sapiens
ttccaggggartcactgccac

SEQ ID NO: 36712 - DNA, 21 bp, Homo sapiens
gaccaaggaaraatgcaaagc

SEQ ID NO: 36713 - DNA, 21 bp, Homo sapiens
tgaatctgacrctgtattgga

SEQ ID NO: 36714 - DNA, 21 bp, Homo sapiens
gacatttgggytgttcccatt

SEQ ID NO: 36715 - DNA, 21 bp, Homo sapiens
gcctggaaaaycaatcctctg

SEQ ID NO: 36716 - DNA, 21 bp, Homo sapiens
cctccctactytctcgctgct

SEQ ID NO: 36717 - DNA, 21 bp, Homo sapiens
tcaggcttttraaaaatgcac

SEQ ID NO: 36718 - DNA, 21 bp, Homo sapiens
aaaccatgacyttgtttacga

SEQ ID NO: 36719 - DNA, 21 bp, Homo sapiens
tgacgcctggstcagagtagg

SEQ ID NO: 36720 - DNA, 21 bp, Homo sapiens
tagtgagttakttgcagtttt

SEQ ID NO: 36721 - DNA, 21 bp, Homo sapiens
tcaaatgaagmtaatgatctc

SEQ ID NO: 36722 - DNA, 21 bp, Homo sapiens
aatttaaaagytctgttgtta

SEQ ID NO: 36723 - DNA, 21 bp, Homo sapiens
ttagctgagcrtttcatattt

SEQ ID NO: 36724 - DNA, 21 bp, Homo sapiens
tccagagaccrtgctcttaac

SEQ ID NO: 36725 - DNA, 21 bp, Homo sapiens
ttttttttttycccctaaata

SEQ ID NO: 36726 - DNA, 21 bp, Homo sapiens
aaaaccttttyctccccatag

SEQ ID NO: 36727 - DNA, 21 bp, Homo sapiens
ccttgggatgygcatgcatat

SEQ ID NO: 36728 - DNA, 21 bp, Homo sapiens
ttgtgattcartgtttgtact

SEQ ID NO: 36729 - DNA, 21 bp, Homo sapiens
ggcaagactckaaagtcattg

SEQ ID NO: 36730 - DNA, 21 bp, Homo sapiens
aatcctagaartaattcaaaa

SEQ ID NO: 36731 - DNA, 21 bp, Homo sapiens
aaaatgcttgrtgttttgaga

SEQ ID NO: 36732 - DNA, 21 bp, Homo sapiens
ctaaagatccmaccaggtcca

SEQ ID NO: 36733 - DNA, 21 bp, Homo sapiens
actggaggaakaaaatagagc

SEQ ID NO: 36734 - DNA, 21 bp, Homo sapiens
aataatattcrttcactaaac

SEQ ID NO: 36735 - DNA, 21 bp, Homo sapiens
accaaaagccrtgggacaact

SEQ ID NO: 36736 - DNA, 21 bp, Homo sapiens
actctacatawaagactgggc

SEQ ID NO: 36737 - DNA, 21 bp, Homo sapiens
caaaatcattrcacctgacaa

SEQ ID NO: 36738 - DNA, 21 bp, Homo sapiens
gaaagcaaatrcctgtgaact

SEQ ID NO: 36739 - DNA, 21 bp, Homo sapiens
agcttagggayttagaatgct

SEQ ID NO: 36740 - DNA, 21 bp, Homo sapiens
aatgttgtgaraaagagtttg

SEQ ID NO: 36741 - DNA, 21 bp, Homo sapiens
tctgcaatctkcttagaaatg

SEQ ID NO: 36742 - DNA, 21 bp, Homo sapiens
caactctgaamtgcttgtagg

SEQ ID NO: 36743 - DNA, 21 bp, Homo sapiens
ctttttgttaycttatttact

SEQ ID NO: 36744 - DNA, 21 bp, Homo sapiens
ttagtctgctrtgtaagatta

SEQ ID NO: 36745 - DNA, 21 bp, Homo sapiens
taagtgctccrggctgtgtga

SEQ ID NO: 36746 - DNA, 21 bp, Homo sapiens
aaaacaagaartatctcccag

SEQ ID NO: 36747 - DNA, 21 bp, Homo sapiens
aatttgtagcrtagaaagttc

SEQ ID NO: 36748 - DNA, 21 bp, Homo sapiens
cataaaacacwagctggttat

SEQ ID NO: 36749 - DNA, 21 bp, Homo sapiens
gatattacagwtataaaaaaa

SEQ ID NO: 36750 - DNA, 21 bp, Homo sapiens
aggaacacagyaatcttcatt

SEQ ID NO: 36751 - DNA, 21 bp, Homo sapiens
attgccatagmaccttaacaa

SEQ ID NO: 36752 - DNA, 21 bp, Homo sapiens
ccaacctcaamctaaaaacac

SEQ ID NO: 36753 - DNA, 21 bp, Homo sapiens
ttgagaagaaygtcctcattt

SEQ ID NO: 36754 - DNA, 21 bp, Homo sapiens
ccaaagcaatkgatagagata

SEQ ID NO: 36755 - DNA, 21 bp, Homo sapiens
aggaatgacartgtctgctta

SEQ ID NO: 36756 - DNA, 21 bp, Homo sapiens
ttggtttctcytccgtgtttt

SEQ ID NO: 36757 - DNA, 21 bp, Homo sapiens
ctaggttgccmttctctcaga

SEQ ID NO: 36758 - DNA, 21 bp, Homo sapiens
ttatccatttyggtcagtgac

SEQ ID NO: 36759 - DNA, 21 bp, Homo sapiens
cttatatttarctaattatac

SEQ ID NO: 36760 - DNA, 21 bp, Homo sapiens
tttcccaggtwcagctacatg

SEQ ID NO: 36761 - DNA, 21 bp, Homo sapiens
gacatctgatkcagttttctt

SEQ ID NO: 36762 - DNA, 21 bp, Homo sapiens
acgcgaggcaraagcaatatt

SEQ ID NO: 36763 - DNA, 21 bp, Homo sapiens
ctttcatttgmccagtgtttt

SEQ ID NO: 36764 - DNA, 21 bp, Homo sapiens
acagtaattayccaacagcat

SEQ ID NO: 36765 - DNA, 21 bp, Homo sapiens
ctttgtgctcmcttgtggttt

SEQ ID NO: 36766 - DNA, 21 bp, Homo sapiens
gcaacataccrtgtaaatcat

SEQ ID NO: 36767 - DNA, 21 bp, Homo sapiens
gaagattgtgstgaagggctg

SEQ ID NO: 36768 - DNA, 21 bp, Homo sapiens
tcttcttaatmaactttgcat

SEQ ID NO: 36769 - DNA, 21 bp, Homo sapiens
actatccaccrtccatttaac

SEQ ID NO: 36770 - DNA, 21 bp, Homo sapiens
acttgctccastatggcaaac

SEQ ID NO: 36771 - DNA, 21 bp, Homo sapiens
aggtaatgcaragtcttaaac

SEQ ID NO: 36772 - DNA, 21 bp, Homo sapiens
gaaagtgttcrttgtttagca

SEQ ID NO: 36773 - DNA, 21 bp, Homo sapiens
agggcaattayccaacccaga

SEQ ID NO: 36774 - DNA, 21 bp, Homo sapiens
tcattgatcayactattcttc

SEQ ID NO: 36775 - DNA, 21 bp, Homo sapiens
aatgatggcaractcctttct

SEQ ID NO: 36776 - DNA, 21 bp, Homo sapiens
tcaatgaaccrgggcctgaag

SEQ ID NO: 36777 - DNA, 21 bp, Homo sapiens
aagtcatagaycgaaactttg

SEQ ID NO: 36778 - DNA, 21 bp, Homo sapiens
agccagatcaygagggtattg

SEQ ID NO: 36779 - DNA, 21 bp, Homo sapiens
aaaatgataayaaattggact

SEQ ID NO: 36780 - DNA, 21 bp, Homo sapiens
cttgctaaatyctccccattc

SEQ ID NO: 36781 - DNA, 21 bp, Homo sapiens
ttacaaaaaawgagtgagctc

SEQ ID NO: 36782 - DNA, 21 bp, Homo sapiens
gttgatgttamcctccagttt

SEQ ID NO: 36783 - DNA, 21 bp, Homo sapiens
tccaagcatcrgcagaaagcc

SEQ ID NO: 36784 - DNA, 21 bp, Homo sapiens
gaaaactcttkccattagcat

SEQ ID NO: 36785 - DNA, 21 bp, Homo sapiens
ttagaaatctyggaaatgagt

SEQ ID NO: 36786 - DNA, 21 bp, Homo sapiens
tggcaataacsagtactaggt

SEQ ID NO: 36787 - DNA, 21 bp, Homo sapiens
tcaatgtctcrtttttcttgt

SEQ ID NO: 36788 - DNA, 21 bp, Homo sapiens
atgcttcaggrcataaactta

SEQ ID NO: 36789 - DNA, 21 bp, Homo sapiens
tatgattgtakttcacccatc

SEQ ID NO: 36790 - DNA, 21 bp, Homo sapiens
tatgcccatcygagccactag

SEQ ID NO: 36791 - DNA, 21 bp, Homo sapiens
gacctcatatrtgttccagat

SEQ ID NO: 36792 - DNA, 21 bp, Homo sapiens
aaataaacacrtaaagctatt

SEQ ID NO: 36793 - DNA, 21 bp, Homo sapiens
catgagggatrgtgccacaga

SEQ ID NO: 36794 - DNA, 21 bp, Homo sapiens
gtcatgaatayattgcattac

SEQ ID NO: 36795 - DNA, 21 bp, Homo sapiens
tgtaatcatascaccctgcag

SEQ ID NO: 36796 - DNA, 21 bp, Homo sapiens
ttcaataggcktttaactagt

SEQ ID NO: 36797 - DNA, 21 bp, Homo sapiens
agaatctggaygcgtgggtct

SEQ ID NO: 36798 - DNA, 21 bp, Homo sapiens
atattatttcygcaatgtttc

SEQ ID NO: 36799 - DNA, 21 bp, Homo sapiens
caatagagggytaaatttaaa

SEQ ID NO: 36800 - DNA, 21 bp, Homo sapiens
agctcagtcawtcttgtttag

SEQ ID NO: 36801 - DNA, 21 bp, Homo sapiens
tccttttgccrtgaatggaca

SEQ ID NO: 36802 - DNA, 21 bp, Homo sapiens
gtattcaaatygatcacctag

SEQ ID NO: 36803 - DNA, 21 bp, Homo sapiens
taaaagtttgytcacctcccc

SEQ ID NO: 36804 - DNA, 21 bp, Homo sapiens
gaggaaacaastaggaacaat

SEQ ID NO: 36805 - DNA, 21 bp, Homo sapiens
aacaggttatmtttcaaggcc

SEQ ID NO: 36806 - DNA, 21 bp, Homo sapiens
tggggtaatcrtccttaaact

SEQ ID NO: 36807 - DNA, 21 bp, Homo sapiens
tctcattaaartttcaaaacc

SEQ ID NO: 36808 - DNA, 21 bp, Homo sapiens
atagtcaaaasagttaacatt

SEQ ID NO: 36809 - DNA, 21 bp, Homo sapiens
cacaaaacaargttcccaaga

SEQ ID NO: 36810 - DNA, 21 bp, Homo sapiens
gaaactaatayagttggtgaa

SEQ ID NO: 36811 - DNA, 21 bp, Homo sapiens
tgtgtaggccmtggagtccag

SEQ ID NO: 36812 - DNA, 21 bp, Homo sapiens
tcagatagagraatttcatat

SEQ ID NO: 36813 - DNA, 21 bp, Homo sapiens
tgatatcttaygaggttttgc

SEQ ID NO: 36814 - DNA, 21 bp, Homo sapiens
aaaagcacaasgagtgtggct

SEQ ID NO: 36815 - DNA, 21 bp, Homo sapiens
aggctatgtaygcaagatgat

SEQ ID NO: 36816 - DNA, 21 bp, Homo sapiens
ggctgaggaaractaaattgt

SEQ ID NO: 36817 - DNA, 21 bp, Homo sapiens
tgtgaattaawcatagtgtgt

SEQ ID NO: 36818 - DNA, 21 bp, Homo sapiens
tttaacagggygtgacataaa

SEQ ID NO: 36819 - DNA, 21 bp, Homo sapiens
ccagctcagtwattgagagta

SEQ ID NO: 36820 - DNA, 21 bp, Homo sapiens
cattaatagakaaatcccacg

SEQ ID NO: 36821 - DNA, 21 bp, Homo sapiens
acaagggagaktggaccatac

SEQ ID NO: 36822 - DNA, 21 bp, Homo sapiens
catgggcgctrgtaaatgatc

SEQ ID NO: 36823 - DNA, 21 bp, Homo sapiens
gctgaaaatakagttgtttcc

SEQ ID NO: 36824 - DNA, 21 bp, Homo sapiens
tgcttattaaytgggttttct

SEQ ID NO: 36825 - DNA, 21 bp, Homo sapiens
caggagagagyggagtgtggt

SEQ ID NO: 36826 - DNA, 21 bp, Homo sapiens
ttggttaaaastcactggtga

SEQ ID NO: 36827 - DNA, 21 bp, Homo sapiens
gtattattttyacttggagct

SEQ ID NO: 36828 - DNA, 21 bp, Homo sapiens
atatgaaatcmctccatttgc

SEQ ID NO: 36829 - DNA, 21 bp, Homo sapiens
acttctacctrcattccattg

SEQ ID NO: 36830 - DNA, 21 bp, Homo sapiens
gactaagacarcttcataatg

SEQ ID NO: 36831 - DNA, 21 bp, Homo sapiens
ttagatacggycatcagtgtg

SEQ ID NO: 36832 - DNA, 21 bp, Homo sapiens
gacaaagagcmtcctaggtca

SEQ ID NO: 36833 - DNA, 21 bp, Homo sapiens
gcaagtgccawattctgtttt

SEQ ID NO: 36834 - DNA, 21 bp, Homo sapiens
ataattttaayagtcctgaat

SEQ ID NO: 36835 - DNA, 21 bp, Homo sapiens
atttcactggmaacttttacc

SEQ ID NO: 36836 - DNA, 21 bp, Homo sapiens
ccagagcctayattagaatta

SEQ ID NO: 36837 - DNA, 21 bp, Homo sapiens
tcctacttaamctggctgagt

SEQ ID NO: 36838 - DNA, 21 bp, Homo sapiens
aattccttacrttctcccccc

SEQ ID NO: 36839 - DNA, 21 bp, Homo sapiens
agtctgaaccyatcaatggag

SEQ ID NO: 36840 - DNA, 21 bp, Homo sapiens
tgccttatttrgcattattca

SEQ ID NO: 36841 - DNA, 21 bp, Homo sapiens
agtgagctcargctgcctgca

SEQ ID NO: 36842 - DNA, 21 bp, Homo sapiens
ccagatctccyttatattcct

SEQ ID NO: 36843 - DNA, 21 bp, Homo sapiens
tccagcatccygtctctcatg

SEQ ID NO: 36844 - DNA, 21 bp, Homo sapiens
tattcaatgakgaggaggtta

SEQ ID NO: 36845 - DNA, 21 bp, Homo sapiens
attttttgacmcttctttgct

SEQ ID NO: 36846 - DNA, 21 bp, Homo sapiens
gtctagctagrgcacaaaaat

SEQ ID NO: 36847 - DNA, 21 bp, Homo sapiens
tttgttctgaygaaacagttg

SEQ ID NO: 36848 - DNA, 21 bp, Homo sapiens
gatatttttcragaaggttgt

SEQ ID NO: 36849 - DNA, 21 bp, Homo sapiens
gcacagtgcakccaacctttt

SEQ ID NO: 36850 - DNA, 21 bp, Homo sapiens
aaagatactamtccccaaaaa

SEQ ID NO: 36851 - DNA, 21 bp, Homo sapiens
agaatatcacrtcttgggtaa

SEQ ID NO: 36852 - DNA, 21 bp, Homo sapiens
ttgatgcaagmagttgtaatt

SEQ ID NO: 36853 - DNA, 21 bp, Homo sapiens
aatggcatgamtcttgggaac

SEQ ID NO: 36854 - DNA, 21 bp, Homo sapiens
aaggacttgayctcacaagca

SEQ ID NO: 36855 - DNA, 21 bp, Homo sapiens
tattttcatamgagtgtcatg

SEQ ID NO: 36856 - DNA, 21 bp, Homo sapiens
tggtttggtamcttcaattag

SEQ ID NO: 36857 - DNA, 21 bp, Homo sapiens
gtacttttctrttctacttta

SEQ ID NO: 36858 - DNA, 21 bp, Homo sapiens
ctacagacctstcatgcagct

SEQ ID NO: 36859 - DNA, 21 bp, Homo sapiens
tctcatgtctmatgttccctc

SEQ ID NO: 36860 - DNA, 21 bp, Homo sapiens
caagtcttgtyatttgtatgc

SEQ ID NO: 36861 - DNA, 21 bp, Homo sapiens
aaacattagcyttatccatta

SEQ ID NO: 36862 - DNA, 21 bp, Homo sapiens
cgttgtgactrtattagcttg

SEQ ID NO: 36863 - DNA, 21 bp, Homo sapiens
gagaagatacraggccaaagt

SEQ ID NO: 36864 - DNA, 21 bp, Homo sapiens
gaaaactagcratcattgtcc

SEQ ID NO: 36865 - DNA, 21 bp, Homo sapiens
tgccttttttwaaaaacaatc

SEQ ID NO: 36866 - DNA, 21 bp, Homo sapiens
gcttttcccawaggcaacaca

SEQ ID NO: 36867 - DNA, 21 bp, Homo sapiens
tttgtccacargagtatgatg

SEQ ID NO: 36868 - DNA, 21 bp, Homo sapiens
cacttggcatrttttaataag

SEQ ID NO: 36869 - DNA, 21 bp, Homo sapiens
ggcaggaggcrgcagagaaga

SEQ ID NO: 36870 - DNA, 21 bp, Homo sapiens
cgcttctgtcyggtaaggagt

SEQ ID NO: 36871 - DNA, 21 bp, Homo sapiens
gcttggcaaartttcctggga

SEQ ID NO: 36872 - DNA, 21 bp, Homo sapiens
tggccaacacrgagtccatgt

SEQ ID NO: 36873 - DNA, 21 bp, Homo sapiens
ccagtggaaaygtcaggagaa

SEQ ID NO: 36874 - DNA, 21 bp, Homo sapiens
ctataacctayataaaagaca

SEQ ID NO: 36875 - DNA, 21 bp, Homo sapiens
cactttaaatrtttgcagaag

SEQ ID NO: 36876 - DNA, 21 bp, Homo sapiens
ttggcaagacragcttcgtgt

SEQ ID NO: 36877 - DNA, 21 bp, Homo sapiens
tggaactagaytatgtggtat

SEQ ID NO: 36878 - DNA, 21 bp, Homo sapiens
ggtactcactrtcttcacgga

SEQ ID NO: 36879 - DNA, 21 bp, Homo sapiens
tttaagttaamcaactcaaat

SEQ ID NO: 36880 - DNA, 21 bp, Homo sapiens
tctctgtgaarttacgtaatt

SEQ ID NO: 36881 - DNA, 21 bp, Homo sapiens
tgtgatctgcmctacccaaaa

SEQ ID NO: 36882 - DNA, 21 bp, Homo sapiens
gaaaagagatwaaatttacca

SEQ ID NO: 36883 - DNA, 21 bp, Homo sapiens
catatccatakctatacacac

SEQ ID NO: 36884 - DNA, 21 bp, Homo sapiens
gtgctatcacrctttttccct

SEQ ID NO: 36885 - DNA, 21 bp, Homo sapiens
attatcacctrcaaatggaag

SEQ ID NO: 36886 - DNA, 21 bp, Homo sapiens
ttccttaaaartctctctctc

SEQ ID NO: 36887 - DNA, 21 bp, Homo sapiens
gtctttccctyctaagcatgg

SEQ ID NO: 36888 - DNA, 21 bp, Homo sapiens
gagtgcaaaasaaacaataac

SEQ ID NO: 36889 - DNA, 21 bp, Homo sapiens
acatgcttgtrtaagataatc

SEQ ID NO: 36890 - DNA, 21 bp, Homo sapiens
accttagaaawaatggtagct

SEQ ID NO: 36891 - DNA, 21 bp, Homo sapiens
gttgagtagcrtaactgaagt

SEQ ID NO: 36892 - DNA, 21 bp, Homo sapiens
tgaatcttagrgtgcaatgtc

SEQ ID NO: 36893 - DNA, 21 bp, Homo sapiens
gtgatatgacwtcttggttgc

SEQ ID NO: 36894 - DNA, 21 bp, Homo sapiens
tcatcccggcrttctttccag

SEQ ID NO: 36895 - DNA, 21 bp, Homo sapiens
atttgaggatrtaggggtaac

SEQ ID NO: 36896 - DNA, 21 bp, Homo sapiens
ggacatcagawgggagaaaat

SEQ ID NO: 36897 - DNA, 21 bp, Homo sapiens
ctaaaactttytctctcttcc

SEQ ID NO: 36898 - DNA, 21 bp, Homo sapiens
gacattgtatyatttcttaag

SEQ ID NO: 36899 - DNA, 21 bp, Homo sapiens
tgtcctaacgwagtagtattt

SEQ ID NO: 36900 - DNA, 21 bp, Homo sapiens
acattttcagytggttcagta

SEQ ID NO: 36901 - DNA, 21 bp, Homo sapiens
ctgctggtgaytgtgccatga

SEQ ID NO: 36902 - DNA, 21 bp, Homo sapiens
agcagggctcytacccagcag

SEQ ID NO: 36903 - DNA, 21 bp, Homo sapiens
atatggctcayacacatgcat

SEQ ID NO: 36904 - DNA, 21 bp, Homo sapiens
tgtttccattycccatgtgag

SEQ ID NO: 36905 - DNA, 21 bp, Homo sapiens
ttgacaggaargagctgtcca

SEQ ID NO: 36906 - DNA, 21 bp, Homo sapiens
ccactctgccscagggttgcc

SEQ ID NO: 36907 - DNA, 21 bp, Homo sapiens
agtgacaggartgactctaac

SEQ ID NO: 36908 - DNA, 21 bp, Homo sapiens
attcataatayggggatttct

SEQ ID NO: 36909 - DNA, 21 bp, Homo sapiens
tgaaactgtawgcagggggtg

SEQ ID NO: 36910 - DNA, 21 bp, Homo sapiens
taaagatatartgttaccctg

SEQ ID NO: 36911 - DNA, 21 bp, Homo sapiens
gacactccatyggcctgggca

SEQ ID NO: 36912 - DNA, 21 bp, Homo sapiens
aatggtaaggmaagtgcttga

SEQ ID NO: 36913 - DNA, 21 bp, Homo sapiens
ctaatggcaaktctgctcacc

SEQ ID NO: 36914 - DNA, 21 bp, Homo sapiens
tgcaagtgctrtgccgacatg

SEQ ID NO: 36915 - DNA, 21 bp, Homo sapiens
ctcgaggaatraaatggtcaa

SEQ ID NO: 36916 - DNA, 21 bp, Homo sapiens
aaagctatgtsaaagcttatc

SEQ ID NO: 36917 - DNA, 21 bp, Homo sapiens
ttttaattatyacctctttgt

SEQ ID NO: 36918 - DNA, 21 bp, Homo sapiens
tactttgaaasagaattaaaa

SEQ ID NO: 36919 - DNA, 21 bp, Homo sapiens
aatcaatatastaatctcaac

SEQ ID NO: 36920 - DNA, 21 bp, Homo sapiens
caaagacttasgtgcgcccac

SEQ ID NO: 36921 - DNA, 21 bp, Homo sapiens
tttatatttamatcgttaagg

SEQ ID NO: 36922 - DNA, 21 bp, Homo sapiens
ctttcgactcyatgtattcga

SEQ ID NO: 36923 - DNA, 21 bp, Homo sapiens
tcatcgccgakccgcacaaag

SEQ ID NO: 36924 - DNA, 21 bp, Homo sapiens
gggcccagcayctggcaaggg

SEQ ID NO: 36925 - DNA, 21 bp, Homo sapiens
ctcttccccaraatctcagcc

SEQ ID NO: 36926 - DNA, 21 bp, Homo sapiens
agccactgggmgaagcgtgtt

SEQ ID NO: 36927 - DNA, 21 bp, Homo sapiens
gcctgtgtccygtcctccctg

SEQ ID NO: 36928 - DNA, 21 bp, Homo sapiens
ggctagatgartaactgctga

SEQ ID NO: 36929 - DNA, 21 bp, Homo sapiens
tgcagatctcmtgaaacagca

SEQ ID NO: 36930 - DNA, 21 bp, Homo sapiens
gccaactgggmagacttgggt

SEQ ID NO: 36931 - DNA, 21 bp, Homo sapiens
gtccctgaatrttggctttct

SEQ ID NO: 36932 - DNA, 21 bp, Homo sapiens
ctgataaacayagaaattggc

SEQ ID NO: 36933 - DNA, 21 bp, Homo sapiens
tggggcctgcrtactgatgcc

SEQ ID NO: 36934 - DNA, 21 bp, Homo sapiens
tgtaaggtgcktgtatatgtc

SEQ ID NO: 36935 - DNA, 21 bp, Homo sapiens
ccaatctcccrtggagactga

SEQ ID NO: 36936 - DNA, 21 bp, Homo sapiens
acagagatccrctcgcacttt

SEQ ID NO: 36937 - DNA, 21 bp, Homo sapiens
agcatcaggtrtatctcagcc

SEQ ID NO: 36938 - DNA, 21 bp, Homo sapiens
gattggcttayttgtaaaata

SEQ ID NO: 36939 - DNA, 21 bp, Homo sapiens
tgaaataagawtgcttcaagg

SEQ ID NO: 36940 - DNA, 21 bp, Homo sapiens
tgaattacaasaaacatataa

SEQ ID NO: 36941 - DNA, 21 bp, Homo sapiens
tagactctacygatggggatg

SEQ ID NO: 36942 - DNA, 21 bp, Homo sapiens
aaaagaaatgratcatcaggt

SEQ ID NO: 36943 - DNA, 21 bp, Homo sapiens
taattgaagtytgaaattcct

SEQ ID NO: 36944 - DNA, 21 bp, Homo sapiens
gactttttgtyaataattcac

SEQ ID NO: 36945 - DNA, 21 bp, Homo sapiens
ctctcttaaawtgtcagactt

SEQ ID NO: 36946 - DNA, 21 bp, Homo sapiens
cattagcaagsaacagcttcc

SEQ ID NO: 36947 - DNA, 21 bp, Homo sapiens
gcttttttatktttcctgttc

SEQ ID NO: 36948 - DNA, 21 bp, Homo sapiens
tccttccattrtttctttaga

SEQ ID NO: 36949 - DNA, 21 bp, Homo sapiens
agctgagttasatttattaaa

SEQ ID NO: 36950 - DNA, 21 bp, Homo sapiens
tgatcatactrgatgtgataa

SEQ ID NO: 36951 - DNA, 21 bp, Homo sapiens
tcctggtagarctaggtagtc

SEQ ID NO: 36952 - DNA, 21 bp, Homo sapiens
aggctttgaaytaaatttgtt

SEQ ID NO: 36953 - DNA, 21 bp, Homo sapiens
caatatcagcycattaagcat

SEQ ID NO: 36954 - DNA, 21 bp, Homo sapiens
ttttcttcccyacatgtaact

SEQ ID NO: 36955 - DNA, 21 bp, Homo sapiens
gcttttggggytacccctgaa

SEQ ID NO: 36956 - DNA, 21 bp, Homo sapiens
tattaatgcgrtacacatctc

SEQ ID NO: 36957 - DNA, 21 bp, Homo sapiens
aaaaatgcaayaagcaataag

SEQ ID NO: 36958 - DNA, 21 bp, Homo sapiens
ttctaattgcyttaatctctt

SEQ ID NO: 36959 - DNA, 21 bp, Homo sapiens
ctgtccttgcmtacttttcca

SEQ ID NO: 36960 - DNA, 21 bp, Homo sapiens
ttgtgatattkcagtaaacat

SEQ ID NO: 36961 - DNA, 21 bp, Homo sapiens
ccctgaaaaarccccacaagt

SEQ ID NO: 36962 - DNA, 21 bp, Homo sapiens
gggctaaacasatacaaagat

SEQ ID NO: 36963 - DNA, 21 bp, Homo sapiens
gatactggggkttagaaattc

SEQ ID NO: 36964 - DNA, 21 bp, Homo sapiens
ttctaaaataygttgagatta

SEQ ID NO: 36965 - DNA, 21 bp, Homo sapiens
caacatttttwaaaaaaattt

SEQ ID NO: 36966 - DNA, 21 bp, Homo sapiens
ttgtttgtaartggatgtcag

SEQ ID NO: 36967 - DNA, 21 bp, Homo sapiens
agtgagtagamtatacctcag

SEQ ID NO: 36968 - DNA, 21 bp, Homo sapiens
aagtgcttagsaaaagtgttc

SEQ ID NO: 36969 - DNA, 21 bp, Homo sapiens
atgcagtggtrcctagaggct

SEQ ID NO: 36970 - DNA, 21 bp, Homo sapiens
accaattctastccaactatt

SEQ ID NO: 36971 - DNA, 21 bp, Homo sapiens
tcattcatttwtgttcccatt

SEQ ID NO: 36972 - DNA, 21 bp, Homo sapiens
caaatgaatgmatttagttaa

SEQ ID NO: 36973 - DNA, 21 bp, Homo sapiens
gaatatctaaratcatgccac

SEQ ID NO: 36974 - DNA, 21 bp, Homo sapiens
ggtcaagctcytttgtctgtt

SEQ ID NO: 36975 - DNA, 21 bp, Homo sapiens
ttgaaaagggyattttctgtg

SEQ ID NO: 36976 - DNA, 21 bp, Homo sapiens
agccatgttayttttgacatt

SEQ ID NO: 36977 - DNA, 21 bp, Homo sapiens
gcgaagaaagrtggtttggaa

SEQ ID NO: 36978 - DNA, 21 bp, Homo sapiens
catttgtcctygtcctcatct

SEQ ID NO: 36979 - DNA, 21 bp, Homo sapiens
tattcctattyctgagacagg

SEQ ID NO: 36980 - DNA, 21 bp, Homo sapiens
actcacacggraatgtagtca

SEQ ID NO: 36981 - DNA, 21 bp, Homo sapiens
agagaacttcyatagctatgc

SEQ ID NO: 36982 - DNA, 21 bp, Homo sapiens
gccatgcccartagagctgcc

SEQ ID NO: 36983 - DNA, 21 bp, Homo sapiens
tgcaaaggcawttagtggcaa

SEQ ID NO: 36984 - DNA, 21 bp, Homo sapiens
ggattcctcartttacccagt

SEQ ID NO: 36985 - DNA, 21 bp, Homo sapiens
ttaaaacaaarcaagaggatc

SEQ ID NO: 36986 - DNA, 21 bp, Homo sapiens
gggtcagaacraggagaaaaa

SEQ ID NO: 36987 - DNA, 21 bp, Homo sapiens
ggtattcaaarggtgttcatt

SEQ ID NO: 36988 - DNA, 21 bp, Homo sapiens
actggagtgaraataagacta

SEQ ID NO: 36989 - DNA, 21 bp, Homo sapiens
tttctagtgayggaaatcagt

SEQ ID NO: 36990 - DNA, 21 bp, Homo sapiens
atgtatctatrctttttattg

SEQ ID NO: 36991 - DNA, 21 bp, Homo sapiens
aactgagaaayttaataacaa

SEQ ID NO: 36992 - DNA, 21 bp, Homo sapiens
gccacactgtytataattata

SEQ ID NO: 36993 - DNA, 21 bp, Homo sapiens
gcaacagaagsataaaggctg

SEQ ID NO: 36994 - DNA, 21 bp, Homo sapiens
tgtttatatcrtgcgcaatct

SEQ ID NO: 36995 - DNA, 21 bp, Homo sapiens
gaccaagctckttgtggtcca

SEQ ID NO: 36996 - DNA, 21 bp, Homo sapiens
agtattcccargaggtataaa

SEQ ID NO: 36997 - DNA, 21 bp, Homo sapiens
cacgttttacyacaatctgat

SEQ ID NO: 36998 - DNA, 21 bp, Homo sapiens
tgtcttaagcmtaggtctcag

SEQ ID NO: 36999 - DNA, 21 bp, Homo sapiens
acttcctacaygttatgtggc

SEQ ID NO: 37000 - DNA, 21 bp, Homo sapiens
ttaaagaatcrtggttactat

SEQ ID NO: 37001 - DNA, 21 bp, Homo sapiens
gaaactcaacygactggacgc

SEQ ID NO: 37002 - DNA, 21 bp, Homo sapiens
ttccaaatggyctccaaggta

SEQ ID NO: 37003 - DNA, 21 bp, Homo sapiens
ttgctcattgyttaggctgaa

SEQ ID NO: 37004 - DNA, 21 bp, Homo sapiens
ttttgaaggcrgaagggaaaa

SEQ ID NO: 37005 - DNA, 21 bp, Homo sapiens
aagatgttttsgtttttctta

SEQ ID NO: 37006 - DNA, 21 bp, Homo sapiens
tgtttccacamaatatcaaca

SEQ ID NO: 37007 - DNA, 21 bp, Homo sapiens
cctgaggtggraaaggctgca

SEQ ID NO: 37008 - DNA, 21 bp, Homo sapiens
gatttttactmtcctagttct

SEQ ID NO: 37009 - DNA, 21 bp, Homo sapiens
tctattaagaygtagaaaaca

SEQ ID NO: 37010 - DNA, 21 bp, Homo sapiens
gtttttctctygtttgcactt

SEQ ID NO: 37011 - DNA, 21 bp, Homo sapiens
gtgtcaacacwacaccaatcc

SEQ ID NO: 37012 - DNA, 21 bp, Homo sapiens
ttccttggtgrtatcgttcaa

SEQ ID NO: 37013 - DNA, 21 bp, Homo sapiens
aaaggtgactytgaaattgca

SEQ ID NO: 37014 - DNA, 21 bp, Homo sapiens
tttttctccakgtcacttagg

SEQ ID NO: 37015 - DNA, 21 bp, Homo sapiens
tgacaaagagmtacaggcatg

SEQ ID NO: 37016 - DNA, 21 bp, Homo sapiens
tatttgtggartatgagttac

SEQ ID NO: 37017 - DNA, 21 bp, Homo sapiens
attattgtttsaaactaaccc

SEQ ID NO: 37018 - DNA, 21 bp, Homo sapiens
tactaaaagcraagagaaaaa

SEQ ID NO: 37019 - DNA, 21 bp, Homo sapiens
ctagagttacktgattaaatt

SEQ ID NO: 37020 - DNA, 21 bp, Homo sapiens
ataagcatttkgttgaacatt

SEQ ID NO: 37021 - DNA, 21 bp, Homo sapiens
ttggagggagraagcagtcac

SEQ ID NO: 37022 - DNA, 21 bp, Homo sapiens
tcttcccataytgggttgctg

SEQ ID NO: 37023 - DNA, 21 bp, Homo sapiens
tctgttgtccwtattttaaca

SEQ ID NO: 37024 - DNA, 21 bp, Homo sapiens
caaaaaaaagktcaatacact

SEQ ID NO: 37025 - DNA, 21 bp, Homo sapiens
ttttccactgyttttcttctt

SEQ ID NO: 37026 - DNA, 21 bp, Homo sapiens
taaattttatsaggagaactc

SEQ ID NO: 37027 - DNA, 21 bp, Homo sapiens
ccatgatctcyatgatcgagc

SEQ ID NO: 37028 - DNA, 21 bp, Homo sapiens
tactcctggtrttatagtttg

SEQ ID NO: 37029 - DNA, 21 bp, Homo sapiens
ggatatgcatkctattgtaaa

SEQ ID NO: 37030 - DNA, 21 bp, Homo sapiens
gaaatatttgytggatctcat

SEQ ID NO: 37031 - DNA, 21 bp, Homo sapiens
ttcacaacatytaatgcatct

SEQ ID NO: 37032 - DNA, 21 bp, Homo sapiens
tcagttgtacrgagtttagac

SEQ ID NO: 37033 - DNA, 21 bp, Homo sapiens
actctcatttygttttctagt

SEQ ID NO: 37034 - DNA, 21 bp, Homo sapiens
aactagaaatkatcccacaac

SEQ ID NO: 37035 - DNA, 21 bp, Homo sapiens
agtaggttcawcgcaggtcta

SEQ ID NO: 37036 - DNA, 21 bp, Homo sapiens
atgaagggaasactcaaacta

SEQ ID NO: 37037 - DNA, 21 bp, Homo sapiens
tgaatatttaygcccatttcc

SEQ ID NO: 37038 - DNA, 21 bp, Homo sapiens
accaaacatamaaatcagggc

SEQ ID NO: 37039 - DNA, 21 bp, Homo sapiens
cccactctggyttcacacttt

SEQ ID NO: 37040 - DNA, 21 bp, Homo sapiens
atcacattttrttccaactaa

SEQ ID NO: 37041 - DNA, 21 bp, Homo sapiens
aaaggcatgtmcagagcctaa

SEQ ID NO: 37042 - DNA, 21 bp, Homo sapiens
gtcatcatatygctccacatt

SEQ ID NO: 37043 - DNA, 21 bp, Homo sapiens
cgatcaaaaargtcatgttgt

SEQ ID NO: 37044 - DNA, 21 bp, Homo sapiens
catttctccaygtttctcagg

SEQ ID NO: 37045 - DNA, 21 bp, Homo sapiens
acaaaagccartaattccctt

SEQ ID NO: 37046 - DNA, 21 bp, Homo sapiens
ctgtctctgartaacaacagg

SEQ ID NO: 37047 - DNA, 21 bp, Homo sapiens
tctgttctacyatctttaaac

SEQ ID NO: 37048 - DNA, 21 bp, Homo sapiens
tattctaaacyctaccttcca

SEQ ID NO: 37049 - DNA, 21 bp, Homo sapiens
accacgaatgmaggaaatctt

SEQ ID NO: 37050 - DNA, 21 bp, Homo sapiens
aatttctaackcttcaggaga

SEQ ID NO: 37051 - DNA, 21 bp, Homo sapiens
ttgatcttccmcagtggttat

SEQ ID NO: 37052 - DNA, 21 bp, Homo sapiens
ctgtggtccayttttaaatct

SEQ ID NO: 37053 - DNA, 21 bp, Homo sapiens
aatcagacccrtcttttcctg

SEQ ID NO: 37054 - DNA, 21 bp, Homo sapiens
ctgagtacatmgaaccttatt

SEQ ID NO: 37055 - DNA, 21 bp, Homo sapiens
tcctttgtctscatagttgat

SEQ ID NO: 37056 - DNA, 21 bp, Homo sapiens
gtagctgcgtwcccctgctgg

SEQ ID NO: 37057 - DNA, 21 bp, Homo sapiens
ctacaggcctstggatgtaat

SEQ ID NO: 37058 - DNA, 21 bp, Homo sapiens
cgcacactctkaaaagcagat

SEQ ID NO: 37059 - DNA, 21 bp, Homo sapiens
agaatggaagragggccagtc

SEQ ID NO: 37060 - DNA, 21 bp, Homo sapiens
gacacatgaaygtaaaaggag

SEQ ID NO: 37061 - DNA, 21 bp, Homo sapiens
atcaccttacrggggcaatat

SEQ ID NO: 37062 - DNA, 21 bp, Homo sapiens
ggagttagaayagaatacact

SEQ ID NO: 37063 - DNA, 21 bp, Homo sapiens
aaagaatgggkatacacaaca

SEQ ID NO: 37064 - DNA, 21 bp, Homo sapiens
catataaccayaatctcatcc

SEQ ID NO: 37065 - DNA, 21 bp, Homo sapiens
acgttatattygcactaaaag

SEQ ID NO: 37066 - DNA, 21 bp, Homo sapiens
ttaaagataakaattgctgca

SEQ ID NO: 37067 - DNA, 21 bp, Homo sapiens
ctttttgaaayggctttcaaa

SEQ ID NO: 37068 - DNA, 21 bp, Homo sapiens
tgtggaagtgratgagattgc

SEQ ID NO: 37069 - DNA, 21 bp, Homo sapiens
ttacatccttytatttttcac

SEQ ID NO: 37070 - DNA, 21 bp, Homo sapiens
aaataatctaytatcaaagtt

SEQ ID NO: 37071 - DNA, 21 bp, Homo sapiens
gagacaaattktgtgcctcct

SEQ ID NO: 37072 - DNA, 21 bp, Homo sapiens
tgtagtagatycaaaaagatg

SEQ ID NO: 37073 - DNA, 21 bp, Homo sapiens
tcatattcctwcctcaaagcc

SEQ ID NO: 37074 - DNA, 21 bp, Homo sapiens
gcactttgaasaatacagaga

SEQ ID NO: 37075 - DNA, 21 bp, Homo sapiens
gttgtgagtaygggcgagagt

SEQ ID NO: 37076 - DNA, 21 bp, Homo sapiens
gggcagttacrtgagtttttg

SEQ ID NO: 37077 - DNA, 21 bp, Homo sapiens
tttaaattgastttaagtaga

SEQ ID NO: 37078 - DNA, 21 bp, Homo sapiens
gttgaatacartgttgctgag

SEQ ID NO: 37079 - DNA, 21 bp, Homo sapiens
atcagaatatwccgtcctgct

SEQ ID NO: 37080 - DNA, 21 bp, Homo sapiens
tccaggaaccratgaagtaga

SEQ ID NO: 37081 - DNA, 21 bp, Homo sapiens
tcgactttgtyaaccagattg

SEQ ID NO: 37082 - DNA, 21 bp, Homo sapiens
ggcctcacccyactcatggcc

SEQ ID NO: 37083 - DNA, 21 bp, Homo sapiens
ttaaaataaaygccaacaaaa

SEQ ID NO: 37084 - DNA, 21 bp, Homo sapiens
ataacaattcrtatctaatcc

SEQ ID NO: 37085 - DNA, 21 bp, Homo sapiens
ccaaactggtsacaaccacat

SEQ ID NO: 37086 - DNA, 21 bp, Homo sapiens
gtgattgttgratcagctgta

SEQ ID NO: 37087 - DNA, 21 bp, Homo sapiens
aacaactctayagtagctgct

SEQ ID NO: 37088 - DNA, 21 bp, Homo sapiens
ctcacacctcwcaccctatct

SEQ ID NO: 37089 - DNA, 21 bp, Homo sapiens
tgacagtgctrttgtgcagcc

SEQ ID NO: 37090 - DNA, 21 bp, Homo sapiens
tgattatacaytgacagttaa

SEQ ID NO: 37091 - DNA, 21 bp, Homo sapiens
cctggtgtctrtaacgctaat

SEQ ID NO: 37092 - DNA, 21 bp, Homo sapiens
tgaatgacagyggaaaatcta

SEQ ID NO: 37093 - DNA, 21 bp, Homo sapiens
gtaaatcttayactaaacgga

SEQ ID NO: 37094 - DNA, 21 bp, Homo sapiens
gaatgttaacraaggtatagt

SEQ ID NO: 37095 - DNA, 21 bp, Homo sapiens
cagcaagttgsataatacatg

SEQ ID NO: 37096 - DNA, 21 bp, Homo sapiens
atactgtgttygtgatagact

SEQ ID NO: 37097 - DNA, 21 bp, Homo sapiens
tatctggagaytaaataataa

SEQ ID NO: 37098 - DNA, 21 bp, Homo sapiens
aacatgtttakctgctacata

SEQ ID NO: 37099 - DNA, 21 bp, Homo sapiens
caaacatcgaytatctgcata

SEQ ID NO: 37100 - DNA, 21 bp, Homo sapiens
ggtaaagcatwtgagaggtaa

SEQ ID NO: 37101 - DNA, 21 bp, Homo sapiens
attttcagacrttgttacaag

SEQ ID NO: 37102 - DNA, 21 bp, Homo sapiens
ttgtattaaarcttgcctaat

SEQ ID NO: 37103 - DNA, 21 bp, Homo sapiens
gtcttccttgwcattctctgc

SEQ ID NO: 37104 - DNA, 21 bp, Homo sapiens
tagactctgcwgtgttcatat

SEQ ID NO: 37105 - DNA, 21 bp, Homo sapiens
aatggggcgtstcacactttg

SEQ ID NO: 37106 - DNA, 21 bp, Homo sapiens
tccactcccawctatccctca

SEQ ID NO: 37107 - DNA, 21 bp, Homo sapiens
tttaagtagayaatcacaaat

SEQ ID NO: 37108 - DNA, 21 bp, Homo sapiens
aagtaatgagkctgctgcaat

SEQ ID NO: 37109 - DNA, 21 bp, Homo sapiens
atataattttrtaaacttcat

SEQ ID NO: 37110 - DNA, 21 bp, Homo sapiens
tatttttagtrccacatggat

SEQ ID NO: 37111 - DNA, 21 bp, Homo sapiens
gttttagttcwtctctctttg

SEQ ID NO: 37112 - DNA, 21 bp, Homo sapiens
tcttaatccakttttggcctg

SEQ ID NO: 37113 - DNA, 21 bp, Homo sapiens
ctttaaaagayagaatttcag

SEQ ID NO: 37114 - DNA, 21 bp, Homo sapiens
ggcattgctayggaggtgagt

SEQ ID NO: 37115 - DNA, 21 bp, Homo sapiens
caactgctttycatttcaaaa

SEQ ID NO: 37116 - DNA, 21 bp, Homo sapiens
gggaggcctcyttgtggctct

SEQ ID NO: 37117 - DNA, 21 bp, Homo sapiens
cttctcaggayagaaaattaa

SEQ ID NO: 37118 - DNA, 21 bp, Homo sapiens
ctatcgtattrtaactctttt

SEQ ID NO: 37119 - DNA, 21 bp, Homo sapiens
gtgttgttaartactaaatct

SEQ ID NO: 37120 - DNA, 21 bp, Homo sapiens
tcatcactagygttttttacc

SEQ ID NO: 37121 - DNA, 21 bp, Homo sapiens
acaccagctgytgaaagtgct

SEQ ID NO: 37122 - DNA, 21 bp, Homo sapiens
gttagtagggsatttgttcta

SEQ ID NO: 37123 - DNA, 21 bp, Homo sapiens
aaagtgcctcrgagcagaaga

SEQ ID NO: 37124 - DNA, 21 bp, Homo sapiens
acaaatacctyaaaatagtac

SEQ ID NO: 37125 - DNA, 21 bp, Homo sapiens
gttctagttgygtcattttct

SEQ ID NO: 37126 - DNA, 21 bp, Homo sapiens
tgaaataaggrctagtggtaa

SEQ ID NO: 37127 - DNA, 21 bp, Homo sapiens
ggtactgggcrtcagaatagc

SEQ ID NO: 37128 - DNA, 21 bp, Homo sapiens
ctggacactcrcaattccttt

SEQ ID NO: 37129 - DNA, 21 bp, Homo sapiens
tgtaaaaagawaaggagtaag

SEQ ID NO: 37130 - DNA, 21 bp, Homo sapiens
aatgatttccrgagagtcatt

SEQ ID NO: 37131 - DNA, 21 bp, Homo sapiens
atgtgaggcarccaaagagtt

SEQ ID NO: 37132 - DNA, 21 bp, Homo sapiens
caagcctgccsaaaacctgcc

SEQ ID NO: 37133 - DNA, 21 bp, Homo sapiens
ctctctcaccstcttatcttt

SEQ ID NO: 37134 - DNA, 21 bp, Homo sapiens
ttaagtttttmatagcgttct

SEQ ID NO: 37135 - DNA, 21 bp, Homo sapiens
gactgtctcasgcccatagga

SEQ ID NO: 37136 - DNA, 21 bp, Homo sapiens
aaggaggtctytggccctacc

SEQ ID NO: 37137 - DNA, 21 bp, Homo sapiens
acgttgatacrgtagttgatg

SEQ ID NO: 37138 - DNA, 21 bp, Homo sapiens
tctgtctctgyagtcttctga

SEQ ID NO: 37139 - DNA, 21 bp, Homo sapiens
tacaaaatgcygtgataaaca

SEQ ID NO: 37140 - DNA, 21 bp, Homo sapiens
tactgttttcsaggtttctca

SEQ ID NO: 37141 - DNA, 21 bp, Homo sapiens
atagatttgcrtcgggagcct

SEQ ID NO: 37142 - DNA, 21 bp, Homo sapiens
ttattagtgtraagatactct

SEQ ID NO: 37143 - DNA, 21 bp, Homo sapiens
taccagccatygttctaagtg

SEQ ID NO: 37144 - DNA, 21 bp, Homo sapiens
catcgaaaccygatacatcaa

SEQ ID NO: 37145 - DNA, 21 bp, Homo sapiens
aactcatctcratcccttagg

SEQ ID NO: 37146 - DNA, 21 bp, Homo sapiens
agaagcttcaygccctggtct

SEQ ID NO: 37147 - DNA, 21 bp, Homo sapiens
agttaaggacragtgtgtgat

SEQ ID NO: 37148 - DNA, 21 bp, Homo sapiens
tcaaacaataktaatttcaca

SEQ ID NO: 37149 - DNA, 21 bp, Homo sapiens
ctgagttttascgagtcctgc

SEQ ID NO: 37150 - DNA, 21 bp, Homo sapiens
acttttctgayatattttctt

SEQ ID NO: 37151 - DNA, 21 bp, Homo sapiens
tgggtgcgccracatccaaga

SEQ ID NO: 37152 - DNA, 21 bp, Homo sapiens
ccggtttggargcagtaaaat

SEQ ID NO: 37153 - DNA, 21 bp, Homo sapiens
gttgaaaattwtcataataga

SEQ ID NO: 37154 - DNA, 21 bp, Homo sapiens
ccttcctcctytctctcaggc

SEQ ID NO: 37155 - DNA, 21 bp, Homo sapiens
attgcatcatsagggcgtgtt

SEQ ID NO: 37156 - DNA, 21 bp, Homo sapiens
caaagatctgrcacacaaatg

SEQ ID NO: 37157 - DNA, 21 bp, Homo sapiens
ggatgaatagktgaggaacac

SEQ ID NO: 37158 - DNA, 21 bp, Homo sapiens
aaagaaagaaygggataaaaa

SEQ ID NO: 37159 - DNA, 21 bp, Homo sapiens
tttcatgccarggataaatcc

SEQ ID NO: 37160 - DNA, 21 bp, Homo sapiens
tgcaaagtcaygcctcattta

SEQ ID NO: 37161 - DNA, 21 bp, Homo sapiens
catttccatcrcgggatatgt

SEQ ID NO: 37162 - DNA, 21 bp, Homo sapiens
ataattttccrtgaacaccac

SEQ ID NO: 37163 - DNA, 21 bp, Homo sapiens
tcattcaaacyaccatatgtg

SEQ ID NO: 37164 - DNA, 21 bp, Homo sapiens
tgattctgggsattacaacag

SEQ ID NO: 37165 - DNA, 21 bp, Homo sapiens
agtgctactcrgaaataaaaa

SEQ ID NO: 37166 - DNA, 21 bp, Homo sapiens
acaatggtacyggtaaccgag

SEQ ID NO: 37167 - DNA, 21 bp, Homo sapiens
ggaagaaggtsctggccggcc

SEQ ID NO: 37168 - DNA, 21 bp, Homo sapiens
attctgtaaastaatcttcta

SEQ ID NO: 37169 - DNA, 21 bp, Homo sapiens
aacaaaatagytgtcctcaaa

SEQ ID NO: 37170 - DNA, 21 bp, Homo sapiens
ctaggctttgmaggttttaag

SEQ ID NO: 37171 - DNA, 21 bp, Homo sapiens
aagggcccagygttataattt

SEQ ID NO: 37172 - DNA, 21 bp, Homo sapiens
gaattctaccytcccctgaga

SEQ ID NO: 37173 - DNA, 21 bp, Homo sapiens
tctagctaccrtgacattcgc

SEQ ID NO: 37174 - DNA, 21 bp, Homo sapiens
agtcttctagyaaattgttag

SEQ ID NO: 37175 - DNA, 21 bp, Homo sapiens
agctcaacatygggagcaaca

SEQ ID NO: 37176 - DNA, 21 bp, Homo sapiens
ccttaatactracttcttcca

SEQ ID NO: 37177 - DNA, 21 bp, Homo sapiens
gagaggccatrtagcctgcga

SEQ ID NO: 37178 - DNA, 21 bp, Homo sapiens
agacagctgakctttattcat

SEQ ID NO: 37179 - DNA, 21 bp, Homo sapiens
aagactcaaartggtcaacag

SEQ ID NO: 37180 - DNA, 21 bp, Homo sapiens
tccagacaaayaagaggtgca

SEQ ID NO: 37181 - DNA, 21 bp, Homo sapiens
cttaggcttcyttagaaactg

SEQ ID NO: 37182 - DNA, 21 bp, Homo sapiens
agaaattccayggcctgcatc

SEQ ID NO: 37183 - DNA, 21 bp, Homo sapiens
agatgtgtgtsatacaccaaa

SEQ ID NO: 37184 - DNA, 21 bp, Homo sapiens
gaaaatagtcrgtttttcacc

SEQ ID NO: 37185 - DNA, 21 bp, Homo sapiens
caagggtatakaacgtgaagt

SEQ ID NO: 37186 - DNA, 21 bp, Homo sapiens
gggccacgcaygtccttggaa

SEQ ID NO: 37187 - DNA, 21 bp, Homo sapiens
tgcacacattraagtttgaga

SEQ ID NO: 37188 - DNA, 21 bp, Homo sapiens
gaaataccacrtctaattaca

SEQ ID NO: 37189 - DNA, 21 bp, Homo sapiens
ttttcttagtygcagcactga

SEQ ID NO: 37190 - DNA, 21 bp, Homo sapiens
ttgtcatttayatgcagggtg

SEQ ID NO: 37191 - DNA, 21 bp, Homo sapiens
gagcctaaaayctgaattctg

SEQ ID NO: 37192 - DNA, 21 bp, Homo sapiens
gatgtccatcrgctaataagt

SEQ ID NO: 37193 - DNA, 21 bp, Homo sapiens
ctgtcttacaytttaattttt

SEQ ID NO: 37194 - DNA, 21 bp, Homo sapiens
gaggaaaaaamatcctaactt

SEQ ID NO: 37195 - DNA, 21 bp, Homo sapiens
gagatgttaaygtaaatactt

SEQ ID NO: 37196 - DNA, 21 bp, Homo sapiens
aagtgctgaargaacatgaat

SEQ ID NO: 37197 - DNA, 21 bp, Homo sapiens
cctgttttccygagtccagtt

SEQ ID NO: 37198 - DNA, 21 bp, Homo sapiens
gtgtacggtayaacttgactt

SEQ ID NO: 37199 - DNA, 21 bp, Homo sapiens
tccaaaatcarttgctatcat

SEQ ID NO: 37200 - DNA, 21 bp, Homo sapiens
cttggagctaraaagagtctc

SEQ ID NO: 37201 - DNA, 21 bp, Homo sapiens
tcaaattgtgwttttgcatag

SEQ ID NO: 37202 - DNA, 21 bp, Homo sapiens
ggaaaacaggkttgagaggat

SEQ ID NO: 37203 - DNA, 21 bp, Homo sapiens
gtgcctagcargttgaggatg

SEQ ID NO: 37204 - DNA, 21 bp, Homo sapiens
aatacgtgagrtcatggctaa

SEQ ID NO: 37205 - DNA, 21 bp, Homo sapiens
aataattctcsttaaatatag

SEQ ID NO: 37206 - DNA, 21 bp, Homo sapiens
gttttatgagmacacggaaac

SEQ ID NO: 37207 - DNA, 21 bp, Homo sapiens
ggccaaagcayaactgggtaa

SEQ ID NO: 37208 - DNA, 21 bp, Homo sapiens
tgaaatcgttrgccttagatt

SEQ ID NO: 37209 - DNA, 21 bp, Homo sapiens
aacttgcattmatctaggcag

SEQ ID NO: 37210 - DNA, 21 bp, Homo sapiens
tttctgattayggaaaatacc

SEQ ID NO: 37211 - DNA, 21 bp, Homo sapiens
tatccagggaygcttcattct

SEQ ID NO: 37212 - DNA, 21 bp, Homo sapiens
aacccgacagygaatctgcca

SEQ ID NO: 37213 - DNA, 21 bp, Homo sapiens
tagccagcttyatcagtggtg

SEQ ID NO: 37214 - DNA, 21 bp, Homo sapiens
ctgttctaaayagatgcattt

SEQ ID NO: 37215 - DNA, 21 bp, Homo sapiens
gatatggggasagtattagaa

SEQ ID NO: 37216 - DNA, 21 bp, Homo sapiens
tttccacattkaaagtgggaa

SEQ ID NO: 37217 - DNA, 21 bp, Homo sapiens
ttgatattttrcacagtgggc

SEQ ID NO: 37218 - DNA, 21 bp, Homo sapiens
tggcaggtttragttagttct

SEQ ID NO: 37219 - DNA, 21 bp, Homo sapiens
aaacaactcartgtaacccct

SEQ ID NO: 37220 - DNA, 21 bp, Homo sapiens
ctgcctgctcyggatgagttt

SEQ ID NO: 37221 - DNA, 21 bp, Homo sapiens
tgtattagtayttaattgtat

SEQ ID NO: 37222 - DNA, 21 bp, Homo sapiens
aaactgtttcmgtgctcattt

SEQ ID NO: 37223 - DNA, 21 bp, Homo sapiens
ttatgagactraacactccct

SEQ ID NO: 37224 - DNA, 21 bp, Homo sapiens
cgcatccattrtatgcaatta

SEQ ID NO: 37225 - DNA, 21 bp, Homo sapiens
tcaagcatctrttaattgtct

SEQ ID NO: 37226 - DNA, 21 bp, Homo sapiens
ttccccatcamggtaagaata

SEQ ID NO: 37227 - DNA, 21 bp, Homo sapiens
actaaactttraactgattct

SEQ ID NO: 37228 - DNA, 21 bp, Homo sapiens
ttccaacagtycacatccagt

SEQ ID NO: 37229 - DNA, 21 bp, Homo sapiens
agatgatttgyatattttatt

SEQ ID NO: 37230 - DNA, 21 bp, Homo sapiens
tccctcttggycttaatatca

SEQ ID NO: 37231 - DNA, 21 bp, Homo sapiens
tatcgtctagscaggaccctt

SEQ ID NO: 37232 - DNA, 21 bp, Homo sapiens
gagttaagcaraaagagtgat

SEQ ID NO: 37233 - DNA, 21 bp, Homo sapiens
aagccatgatsaagatttaac

SEQ ID NO: 37234 - DNA, 21 bp, Homo sapiens
cctcttaataygctgtagtaa

SEQ ID NO: 37235 - DNA, 21 bp, Homo sapiens
caagatgttcrtctcatcact

SEQ ID NO: 37236 - DNA, 21 bp, Homo sapiens
gtgattattayttccattgta

SEQ ID NO: 37237 - DNA, 21 bp, Homo sapiens
ctctctgaaakgaagctttta

SEQ ID NO: 37238 - DNA, 21 bp, Homo sapiens
tatatcagctrtgaaagaatg

SEQ ID NO: 37239 - DNA, 21 bp, Homo sapiens
ttcccagaatygagcagtttc

SEQ ID NO: 37240 - DNA, 21 bp, Homo sapiens
cttcacataarctttcacgaa

SEQ ID NO: 37241 - DNA, 21 bp, Homo sapiens
atattatgtawacagaaattg

SEQ ID NO: 37242 - DNA, 21 bp, Homo sapiens
atagtgtaatmcttaagggta

SEQ ID NO: 37243 - DNA, 21 bp, Homo sapiens
gcctcatggartgccaaatgt

SEQ ID NO: 37244 - DNA, 21 bp, Homo sapiens
tctacaggtgmatcaagtaac

SEQ ID NO: 37245 - DNA, 21 bp, Homo sapiens
tattatatacrtgcaaaaaaa

SEQ ID NO: 37246 - DNA, 21 bp, Homo sapiens
tacttgcatgsctgaaacttt

SEQ ID NO: 37247 - DNA, 21 bp, Homo sapiens
ccttgacactsagaattcatc

SEQ ID NO: 37248 - DNA, 21 bp, Homo sapiens
aagagccctaraagtgacact

SEQ ID NO: 37249 - DNA, 21 bp, Homo sapiens
tgacagccacrttagtagata

SEQ ID NO: 37250 - DNA, 21 bp, Homo sapiens
ctttttaagcstctagttagt

SEQ ID NO: 37251 - DNA, 21 bp, Homo sapiens
ctcccaccaamttttgcaacc

SEQ ID NO: 37252 - DNA, 21 bp, Homo sapiens
agaacacctasttgtccttgc

SEQ ID NO: 37253 - DNA, 21 bp, Homo sapiens
gtccagcttgkgtaacaaagt

SEQ ID NO: 37254 - DNA, 21 bp, Homo sapiens
aagaagtttayggggcaccaa

SEQ ID NO: 37255 - DNA, 21 bp, Homo sapiens
cataaaacaargtgtttgaac

SEQ ID NO: 37256 - DNA, 21 bp, Homo sapiens
gctagactgcracatcctaga

SEQ ID NO: 37257 - DNA, 21 bp, Homo sapiens
tccactgtgayattttaaaag

SEQ ID NO: 37258 - DNA, 21 bp, Homo sapiens
ctcagttaaamgctgggttaa

SEQ ID NO: 37259 - DNA, 21 bp, Homo sapiens
actacaattgyctttgatatg

SEQ ID NO: 37260 - DNA, 21 bp, Homo sapiens
aaagcattccyatgtaagaaa

SEQ ID NO: 37261 - DNA, 21 bp, Homo sapiens
tttgtcagtgycaaagaatgg

SEQ ID NO: 37262 - DNA, 21 bp, Homo sapiens
aatgcccctcrctccgatctg

SEQ ID NO: 37263 - DNA, 21 bp, Homo sapiens
cctagcctttraagagttatc

SEQ ID NO: 37264 - DNA, 21 bp, Homo sapiens
aaaaggtcacrtcaacactct

SEQ ID NO: 37265 - DNA, 21 bp, Homo sapiens
atcaccattgwatcctcagca

SEQ ID NO: 37266 - DNA, 21 bp, Homo sapiens
gttgagttccrtctaggattg

SEQ ID NO: 37267 - DNA, 21 bp, Homo sapiens
caggtctcttstaagtcagag

SEQ ID NO: 37268 - DNA, 21 bp, Homo sapiens
tgaattctgcytctgtctcac

SEQ ID NO: 37269 - DNA, 21 bp, Homo sapiens
aaaagctgggrtttcagagta

SEQ ID NO: 37270 - DNA, 21 bp, Homo sapiens
catgtttcctyttcattgtgc

SEQ ID NO: 37271 - DNA, 21 bp, Homo sapiens
caggaaggtcwtgaacccttt

SEQ ID NO: 37272 - DNA, 21 bp, Homo sapiens
ataaattacargtgccctctg

SEQ ID NO: 37273 - DNA, 21 bp, Homo sapiens
tatgtcttaaytgaaaagcca

SEQ ID NO: 37274 - DNA, 21 bp, Homo sapiens
tctaaacaaartagaatcaga

SEQ ID NO: 37275 - DNA, 21 bp, Homo sapiens
acgttattggrtggctaaaat

SEQ ID NO: 37276 - DNA, 21 bp, Homo sapiens
atcatcggagrgcaatccctt

SEQ ID NO: 37277 - DNA, 21 bp, Homo sapiens
taggggggctygtagtcatag

SEQ ID NO: 37278 - DNA, 21 bp, Homo sapiens
ctctgtggaamggctccttcc

SEQ ID NO: 37279 - DNA, 21 bp, Homo sapiens
aagaaaatatragcaggaatt

SEQ ID NO: 37280 - DNA, 21 bp, Homo sapiens
gctgtttagcmtcaaggtgtt

SEQ ID NO: 37281 - DNA, 21 bp, Homo sapiens
gggttgaactstaggcagcca

SEQ ID NO: 37282 - DNA, 21 bp, Homo sapiens
tcacctcacargtttaagttt

SEQ ID NO: 37283 - DNA, 21 bp, Homo sapiens
agagtagtatkatgtgacagt

SEQ ID NO: 37284 - DNA, 21 bp, Homo sapiens
gccaatcccgrccctatcatg

SEQ ID NO: 37285 - DNA, 21 bp, Homo sapiens
caaaagcaatygaagtcctag

SEQ ID NO: 37286 - DNA, 21 bp, Homo sapiens
caaaaagtttrtaaggatttg

SEQ ID NO: 37287 - DNA, 21 bp, Homo sapiens
gttatcagaayatatgtccaa

SEQ ID NO: 37288 - DNA, 21 bp, Homo sapiens
gctaacacttygtaaggtgga

SEQ ID NO: 37289 - DNA, 21 bp, Homo sapiens
cggatcactgrgctcaatgtc

SEQ ID NO: 37290 - DNA, 21 bp, Homo sapiens
cacccagaatytccccagtgg

SEQ ID NO: 37291 - DNA, 21 bp, Homo sapiens
tggtaagcaamggagaggaga

SEQ ID NO: 37292 - DNA, 21 bp, Homo sapiens
aagataaaaakacaggctagg

SEQ ID NO: 37293 - DNA, 21 bp, Homo sapiens
tagggcccacygccagaaaat

SEQ ID NO: 37294 - DNA, 21 bp, Homo sapiens
aacggtaaacrcatggtctag

SEQ ID NO: 37295 - DNA, 21 bp, Homo sapiens
tgatactatcmttcgtgcacc

SEQ ID NO: 37296 - DNA, 21 bp, Homo sapiens
gttcatcagtrtctctctaga

SEQ ID NO: 37297 - DNA, 21 bp, Homo sapiens
cttcacgatgygtctcttaga

SEQ ID NO: 37298 - DNA, 21 bp, Homo sapiens
aagctgttctragattccacg

SEQ ID NO: 37299 - DNA, 21 bp, Homo sapiens
tccaagctggrccttgagtgt

SEQ ID NO: 37300 - DNA, 21 bp, Homo sapiens
acgtgctggaygctttgccta

SEQ ID NO: 37301 - DNA, 21 bp, Homo sapiens
tgggaagcaaygggaggtgag

SEQ ID NO: 37302 - DNA, 21 bp, Homo sapiens
tctcttacaargtcatcttac

SEQ ID NO: 37303 - DNA, 21 bp, Homo sapiens
tatcatcggawtggtactgcc

SEQ ID NO: 37304 - DNA, 21 bp, Homo sapiens
aaccagtgccrtgttaggcaa

SEQ ID NO: 37305 - DNA, 21 bp, Homo sapiens
ctgcatccagrtgaggcataa

SEQ ID NO: 37306 - DNA, 21 bp, Homo sapiens
tcacttgttgrgaattatttt

SEQ ID NO: 37307 - DNA, 21 bp, Homo sapiens
tgggctctctragagatgagg

SEQ ID NO: 37308 - DNA, 21 bp, Homo sapiens
ttgaactctaycacctataca

SEQ ID NO: 37309 - DNA, 21 bp, Homo sapiens
aatagctgttkttccagtcct

SEQ ID NO: 37310 - DNA, 21 bp, Homo sapiens
tgtcaccccgyttattttcat

SEQ ID NO: 37311 - DNA, 21 bp, Homo sapiens
tgcctgattcrgaagctccaa

SEQ ID NO: 37312 - DNA, 21 bp, Homo sapiens
gcaaggcaagmaagagatgtc

SEQ ID NO: 37313 - DNA, 21 bp, Homo sapiens
gtcatgaagtygatttaacag

SEQ ID NO: 37314 - DNA, 21 bp, Homo sapiens
agagtgagccrggaacctggc

SEQ ID NO: 37315 - DNA, 21 bp, Homo sapiens
acaagccatgrggcatcccag

SEQ ID NO: 37316 - DNA, 21 bp, Homo sapiens
ttcttctattyctgttgtcag

SEQ ID NO: 37317 - DNA, 21 bp, Homo sapiens
gcaagaattgkggcttctatg

SEQ ID NO: 37318 - DNA, 21 bp, Homo sapiens
gcaagcataarccaggccctg

SEQ ID NO: 37319 - DNA, 21 bp, Homo sapiens
tgaatggagaygaggacaggg

SEQ ID NO: 37320 - DNA, 21 bp, Homo sapiens
ttttccattcrtacgtgaact

SEQ ID NO: 37321 - DNA, 21 bp, Homo sapiens
cctgctggccrtgggtgtcaa

SEQ ID NO: 37322 - DNA, 21 bp, Homo sapiens
agaaatcacayaccaccactt

SEQ ID NO: 37323 - DNA, 21 bp, Homo sapiens
ataaatgctartattgttact

SEQ ID NO: 37324 - DNA, 21 bp, Homo sapiens
gaaaggctttygactttttcc

SEQ ID NO: 37325 - DNA, 21 bp, Homo sapiens
aggagaggagsaacttccttc

SEQ ID NO: 37326 - DNA, 21 bp, Homo sapiens
gggcagagggrcctggtttga

SEQ ID NO: 37327 - DNA, 21 bp, Homo sapiens
tctttacattytcaaggcgag

SEQ ID NO: 37328 - DNA, 21 bp, Homo sapiens
catcacaaccrttttacttgc

SEQ ID NO: 37329 - DNA, 21 bp, Homo sapiens
aactccataaraagttcattg

SEQ ID NO: 37330 - DNA, 21 bp, Homo sapiens
cctctggaatragaattattc

SEQ ID NO: 37331 - DNA, 21 bp, Homo sapiens
ggcaaatgtcrgtcaacctca

SEQ ID NO: 37332 - DNA, 21 bp, Homo sapiens
cactcttacgrcagcaaagac

SEQ ID NO: 37333 - DNA, 21 bp, Homo sapiens
cacttactggstctgtgacat

SEQ ID NO: 37334 - DNA, 21 bp, Homo sapiens
ctgtgaagtayaatagcaaag

SEQ ID NO: 37335 - DNA, 21 bp, Homo sapiens
ttgatcatacrgaactggaag

SEQ ID NO: 37336 - DNA, 21 bp, Homo sapiens
tgggttaggcygggctaaatt

SEQ ID NO: 37337 - DNA, 21 bp, Homo sapiens
caagcaattaygtgcattgcc

SEQ ID NO: 37338 - DNA, 21 bp, Homo sapiens
aggagcaaagygaatcagatc

SEQ ID NO: 37339 - DNA, 21 bp, Homo sapiens
tttatgccackgatcacactc

SEQ ID NO: 37340 - DNA, 21 bp, Homo sapiens
tgggaaagctrtggatgtctc

SEQ ID NO: 37341 - DNA, 21 bp, Homo sapiens
ttacttaatgrtaggtctagc

SEQ ID NO: 37342 - DNA, 21 bp, Homo sapiens
accaacaagaraaggacagtt

SEQ ID NO: 37343 - DNA, 21 bp, Homo sapiens
cattaatgagyttgtaatatt

SEQ ID NO: 37344 - DNA, 21 bp, Homo sapiens
atatgggattrcttctcaaag

SEQ ID NO: 37345 - DNA, 21 bp, Homo sapiens
tgcaagcaagmaaattcttta

SEQ ID NO: 37346 - DNA, 21 bp, Homo sapiens
tgctcagataytgacaccttc

SEQ ID NO: 37347 - DNA, 21 bp, Homo sapiens
caaatattccyagatctttaa

SEQ ID NO: 37348 - DNA, 21 bp, Homo sapiens
tatttaaccaytgaaatattt

SEQ ID NO: 37349 - DNA, 21 bp, Homo sapiens
ggtaagagatyctgacctatg

SEQ ID NO: 37350 - DNA, 21 bp, Homo sapiens
cagggtgctamtgctcctgag

SEQ ID NO: 37351 - DNA, 21 bp, Homo sapiens
aatgtaaggayacttcagatt

SEQ ID NO: 37352 - DNA, 21 bp, Homo sapiens
tgctggagagktttcaaagaa

SEQ ID NO: 37353 - DNA, 21 bp, Homo sapiens
aagacctgggkactagctgag

SEQ ID NO: 37354 - DNA, 21 bp, Homo sapiens
cagagacactyaatacacatt

SEQ ID NO: 37355 - DNA, 21 bp, Homo sapiens
aaggctattayggcagataca

SEQ ID NO: 37356 - DNA, 21 bp, Homo sapiens
ttagcacttayctgtcctctt

SEQ ID NO: 37357 - DNA, 21 bp, Homo sapiens
tgggctagacrtgaattgaaa

SEQ ID NO: 37358 - DNA, 21 bp, Homo sapiens
catagtttgtrtatttcagtc

SEQ ID NO: 37359 - DNA, 21 bp, Homo sapiens
gacaagtcacscagaagagtt

SEQ ID NO: 37360 - DNA, 21 bp, Homo sapiens
cctcagatgcyggtgtacttc

SEQ ID NO: 37361 - DNA, 21 bp, Homo sapiens
gtttaagaagytccttttaga

SEQ ID NO: 37362 - DNA, 21 bp, Homo sapiens
atggaagtacytctcccctaa

SEQ ID NO: 37363 - DNA, 21 bp, Homo sapiens
gaggacgaaakaaagctaata

SEQ ID NO: 37364 - DNA, 21 bp, Homo sapiens
aaactgctgcygggcgttctt

SEQ ID NO: 37365 - DNA, 21 bp, Homo sapiens
ataataagaaraacaagtgct

SEQ ID NO: 37366 - DNA, 21 bp, Homo sapiens
tgctcaacccrtgttgtcaca

SEQ ID NO: 37367 - DNA, 21 bp, Homo sapiens
gttttgaaaasgctacttact

SEQ ID NO: 37368 - DNA, 21 bp, Homo sapiens
tgcctcatttsacaaatagta

SEQ ID NO: 37369 - DNA, 21 bp, Homo sapiens
tccaggaattwggagttgaga

SEQ ID NO: 37370 - DNA, 21 bp, Homo sapiens
tggatgatgaygtgttatttg

SEQ ID NO: 37371 - DNA, 21 bp, Homo sapiens
cttattggacsttctcttttc

SEQ ID NO: 37372 - DNA, 21 bp, Homo sapiens
tatggctatartttatcttca

SEQ ID NO: 37373 - DNA, 21 bp, Homo sapiens
atcacgcgggyggggggcgtg

SEQ ID NO: 37374 - DNA, 21 bp, Homo sapiens
atcaaattacragactctgag

SEQ ID NO: 37375 - DNA, 21 bp, Homo sapiens
attattcatckaaggaatttt

SEQ ID NO: 37376 - DNA, 21 bp, Homo sapiens
caatgaatgcwgagttcttgt

SEQ ID NO: 37377 - DNA, 21 bp, Homo sapiens
tctgactcccrggctagtatt

SEQ ID NO: 37378 - DNA, 21 bp, Homo sapiens
ttactttcatsagtctgagat

SEQ ID NO: 37379 - DNA, 21 bp, Homo sapiens
cctgttgggaytcccagagaa

SEQ ID NO: 37380 - DNA, 21 bp, Homo sapiens
tctcctcagamcaaatataaa

SEQ ID NO: 37381 - DNA, 21 bp, Homo sapiens
cagagaagtgkccaatggtat

SEQ ID NO: 37382 - DNA, 21 bp, Homo sapiens
tctccaaatawgggtttttct

SEQ ID NO: 37383 - DNA, 21 bp, Homo sapiens
ggccacggccstagtgagaga

SEQ ID NO: 37384 - DNA, 21 bp, Homo sapiens
gtgttttttcrtgacaacagc

SEQ ID NO: 37385 - DNA, 21 bp, Homo sapiens
ccactggtgastaataagaca

SEQ ID NO: 37386 - DNA, 21 bp, Homo sapiens
gtaacacttaytaatgggtat

SEQ ID NO: 37387 - DNA, 21 bp, Homo sapiens
ctcatcaaggyttaagttctc

SEQ ID NO: 37388 - DNA, 21 bp, Homo sapiens
cttttgggggrttatcatcta

SEQ ID NO: 37389 - DNA, 21 bp, Homo sapiens
aaagaagaacrtttgagtatt

SEQ ID NO: 37390 - DNA, 21 bp, Homo sapiens
gtcacaagcawgtattatgtg

SEQ ID NO: 37391 - DNA, 21 bp, Homo sapiens
tttattttttrtattttcact

SEQ ID NO: 37392 - DNA, 21 bp, Homo sapiens
ttacatctgaraagcatgaga

SEQ ID NO: 37393 - DNA, 21 bp, Homo sapiens
ttttctccagrgacatgctac

SEQ ID NO: 37394 - DNA, 21 bp, Homo sapiens
tttctgctgayctggaaaaaa

SEQ ID NO: 37395 - DNA, 21 bp, Homo sapiens
ttctgttaagraaggagagaa

SEQ ID NO: 37396 - DNA, 21 bp, Homo sapiens
gcatacccctragcagagaga

SEQ ID NO: 37397 - DNA, 21 bp, Homo sapiens
taaaatattcmttatctggct

SEQ ID NO: 37398 - DNA, 21 bp, Homo sapiens
agttatcaagyattgaatgta

SEQ ID NO: 37399 - DNA, 21 bp, Homo sapiens
aaatgggaacycagtgtctca

SEQ ID NO: 37400 - DNA, 21 bp, Homo sapiens
aatctggtctrtagatgaacc

SEQ ID NO: 37401 - DNA, 21 bp, Homo sapiens
gattttcagayatggatatta

SEQ ID NO: 37402 - DNA, 21 bp, Homo sapiens
cagatttaaaygtaagtgttt

SEQ ID NO: 37403 - DNA, 21 bp, Homo sapiens
agaaaataaaytgagttgcta

SEQ ID NO: 37404 - DNA, 21 bp, Homo sapiens
aaaacccctayataaccttag

SEQ ID NO: 37405 - DNA, 21 bp, Homo sapiens
cattgcctacstggctactag

SEQ ID NO: 37406 - DNA, 21 bp, Homo sapiens
tgaatcttccktaaagggatg

SEQ ID NO: 37407 - DNA, 21 bp, Homo sapiens
ttctactattwaccagcagct

SEQ ID NO: 37408 - DNA, 21 bp, Homo sapiens
attttaaggamgtaaaaccag

SEQ ID NO: 37409 - DNA, 21 bp, Homo sapiens
actgacaagtkgaatgatttt

SEQ ID NO: 37410 - DNA, 21 bp, Homo sapiens
tggggacaggytaacatttag

SEQ ID NO: 37411 - DNA, 21 bp, Homo sapiens
tcaggccagtwcaaacttgct

SEQ ID NO: 37412 - DNA, 21 bp, Homo sapiens
acacatctcaraaggaaccta

SEQ ID NO: 37413 - DNA, 21 bp, Homo sapiens
aattaaaatamgtgtggcgca

SEQ ID NO: 37414 - DNA, 21 bp, Homo sapiens
catacttttargttagttttt

SEQ ID NO: 37415 - DNA, 21 bp, Homo sapiens
aagttgcattmaaaaggattt

SEQ ID NO: 37416 - DNA, 21 bp, Homo sapiens
tcatcatctcycttaatgttc

SEQ ID NO: 37417 - DNA, 21 bp, Homo sapiens
ttttcaaaagyggacaaaaat

SEQ ID NO: 37418 - DNA, 21 bp, Homo sapiens
gtttcagataygtaaaccaga

SEQ ID NO: 37419 - DNA, 21 bp, Homo sapiens
tagtacatgckcaatacattt

SEQ ID NO: 37420 - DNA, 21 bp, Homo sapiens
agaggagtgaygtggataagg

SEQ ID NO: 37421 - DNA, 21 bp, Homo sapiens
atgaaaaaccyttaaatatgg

SEQ ID NO: 37422 - DNA, 21 bp, Homo sapiens
ccaggatggayattaactcgg

SEQ ID NO: 37423 - DNA, 21 bp, Homo sapiens
actttgaaaaygtttccttgg

SEQ ID NO: 37424 - DNA, 21 bp, Homo sapiens
aagttgtgtamaatttttgcc

SEQ ID NO: 37425 - DNA, 21 bp, Homo sapiens
ccttgtcttcmtttaccagtt

SEQ ID NO: 37426 - DNA, 21 bp, Homo sapiens
gtgtatccttsttgtaacaaa

SEQ ID NO: 37427 - DNA, 21 bp, Homo sapiens
tcagatgtagrgaacttagaa

SEQ ID NO: 37428 - DNA, 21 bp, Homo sapiens
acactcttacrcctgctcagt

SEQ ID NO: 37429 - DNA, 21 bp, Homo sapiens
aaaaaagttgytcaaagtaac

SEQ ID NO: 37430 - DNA, 21 bp, Homo sapiens
attacatcaayggagaaatgc

SEQ ID NO: 37431 - DNA, 21 bp, Homo sapiens
tattaatactkctctcctagg

SEQ ID NO: 37432 - DNA, 21 bp, Homo sapiens
taaagacagcrtgaggatact

SEQ ID NO: 37433 - DNA, 21 bp, Homo sapiens
aaattaggttktataacatta

SEQ ID NO: 37434 - DNA, 21 bp, Homo sapiens
tattttaaccmattttcttca

SEQ ID NO: 37435 - DNA, 21 bp, Homo sapiens
aattttgacaktcatttccaa

SEQ ID NO: 37436 - DNA, 21 bp, Homo sapiens
ttttataatcyagagaatcca

SEQ ID NO: 37437 - DNA, 21 bp, Homo sapiens
ttccctagaawtgagcaggat

SEQ ID NO: 37438 - DNA, 21 bp, Homo sapiens
tgtggacagargattggtaaa

SEQ ID NO: 37439 - DNA, 21 bp, Homo sapiens
cagtttaggcmctgtagtaac

SEQ ID NO: 37440 - DNA, 21 bp, Homo sapiens
agaggatgaawgggcatttcc

SEQ ID NO: 37441 - DNA, 21 bp, Homo sapiens
tgaaccaggakcaaggagttc

SEQ ID NO: 37442 - DNA, 21 bp, Homo sapiens
ggtggaaaagmaatttagacc

SEQ ID NO: 37443 - DNA, 21 bp, Homo sapiens
tctgatccaartactaattta

SEQ ID NO: 37444 - DNA, 21 bp, Homo sapiens
atgtgatctasttctgcttag

SEQ ID NO: 37445 - DNA, 21 bp, Homo sapiens
agctccatcaygatattgaaa

SEQ ID NO: 37446 - DNA, 21 bp, Homo sapiens
tggtggtgggrgggaactact

SEQ ID NO: 37447 - DNA, 21 bp, Homo sapiens
taataaggaawgttcatctca

SEQ ID NO: 37448 - DNA, 21 bp, Homo sapiens
gtccttttccrccatggtttg

SEQ ID NO: 37449 - DNA, 21 bp, Homo sapiens
ttgaattttcscagacttcag

SEQ ID NO: 37450 - DNA, 21 bp, Homo sapiens
taagcacaatmtgacacagta

SEQ ID NO: 37451 - DNA, 21 bp, Homo sapiens
cccttggcagyctggattagt

SEQ ID NO: 37452 - DNA, 21 bp, Homo sapiens
ccagggccggkgtgtataggt

SEQ ID NO: 37453 - DNA, 21 bp, Homo sapiens
cttatgttgawttgaagataa

SEQ ID NO: 37454 - DNA, 21 bp, Homo sapiens
tctgtcattayggtactttca

SEQ ID NO: 37455 - DNA, 21 bp, Homo sapiens
cctggctttcyctacgttcct

SEQ ID NO: 37456 - DNA, 21 bp, Homo sapiens
aagtgagcttycttgcagctg

SEQ ID NO: 37457 - DNA, 21 bp, Homo sapiens
cttctctataygtgtagaaaa

SEQ ID NO: 37458 - DNA, 21 bp, Homo sapiens
taaaatgtgayaattaacaat

SEQ ID NO: 37459 - DNA, 21 bp, Homo sapiens
tgataatggcyctgtatacca

SEQ ID NO: 37460 - DNA, 21 bp, Homo sapiens
gaaattaaaawatgttcttga

SEQ ID NO: 37461 - DNA, 21 bp, Homo sapiens
tctcttttttyctgtatcatt

SEQ ID NO: 37462 - DNA, 21 bp, Homo sapiens
tgggatgctaytgctttctgt

SEQ ID NO: 37463 - DNA, 21 bp, Homo sapiens
acatttttacrtttgacaaac

SEQ ID NO: 37464 - DNA, 21 bp, Homo sapiens
tgtagttctaygagatttata

SEQ ID NO: 37465 - DNA, 21 bp, Homo sapiens
atttgttctayataatttgac

SEQ ID NO: 37466 - DNA, 21 bp, Homo sapiens
catttaatggytccccttggt

SEQ ID NO: 37467 - DNA, 21 bp, Homo sapiens
aagcatactgrcatcttgaaa

SEQ ID NO: 37468 - DNA, 21 bp, Homo sapiens
atattttttcktacttctaag

SEQ ID NO: 37469 - DNA, 21 bp, Homo sapiens
gctagacatgktagatttgct

SEQ ID NO: 37470 - DNA, 21 bp, Homo sapiens
ctagaacagtratagacaaag

SEQ ID NO: 37471 - DNA, 21 bp, Homo sapiens
atatgacaacygcttccccac

SEQ ID NO: 37472 - DNA, 21 bp, Homo sapiens
agagatcctcyaggcaagctg

SEQ ID NO: 37473 - DNA, 21 bp, Homo sapiens
aacgggctaaytgacatattt

SEQ ID NO: 37474 - DNA, 21 bp, Homo sapiens
ccacagaaaasgtctgagagg

SEQ ID NO: 37475 - DNA, 21 bp, Homo sapiens
gtaaaaattcyggaggcatgg

SEQ ID NO: 37476 - DNA, 21 bp, Homo sapiens
agatttgaaaytttggtaggg

SEQ ID NO: 37477 - DNA, 21 bp, Homo sapiens
gtgccaagttstttgtaaata

SEQ ID NO: 37478 - DNA, 21 bp, Homo sapiens
tactttgatasactagaggtc

SEQ ID NO: 37479 - DNA, 21 bp, Homo sapiens
tcgtctgtgcygcccgggcct

SEQ ID NO: 37480 - DNA, 21 bp, Homo sapiens
taacattcacrttagtcagat

SEQ ID NO: 37481 - DNA, 21 bp, Homo sapiens
atatgtaatcygataatgttg

SEQ ID NO: 37482 - DNA, 21 bp, Homo sapiens
atgccttgttrgattttttag

SEQ ID NO: 37483 - DNA, 21 bp, Homo sapiens
tgtctgcaatktttcagcttt

SEQ ID NO: 37484 - DNA, 21 bp, Homo sapiens
accaaactgamcttccaccat

SEQ ID NO: 37485 - DNA, 21 bp, Homo sapiens
ttatttggctytacagtggga

SEQ ID NO: 37486 - DNA, 21 bp, Homo sapiens
aattttaaatraaatgtataa

SEQ ID NO: 37487 - DNA, 21 bp, Homo sapiens
caggagaaaarctagattcgg

SEQ ID NO: 37488 - DNA, 21 bp, Homo sapiens
tcacataacarcactgctata

SEQ ID NO: 37489 - DNA, 21 bp, Homo sapiens
gctattctaartgtggatgct

SEQ ID NO: 37490 - DNA, 21 bp, Homo sapiens
aatgtatcaastcatttccaa

SEQ ID NO: 37491 - DNA, 21 bp, Homo sapiens
acttagatgartttttcaacc

SEQ ID NO: 37492 - DNA, 21 bp, Homo sapiens
cagaactgtayctaggatttc

SEQ ID NO: 37493 - DNA, 21 bp, Homo sapiens
ggctttgtgaraaatactctt

SEQ ID NO: 37494 - DNA, 21 bp, Homo sapiens
aatagtaattygtcattcttg

SEQ ID NO: 37495 - DNA, 21 bp, Homo sapiens
tttctggaagygaagaaccta

SEQ ID NO: 37496 - DNA, 21 bp, Homo sapiens
ctgactgatawgccaatgtaa

SEQ ID NO: 37497 - DNA, 21 bp, Homo sapiens
ctgctgtttaygacctgggct

SEQ ID NO: 37498 - DNA, 21 bp, Homo sapiens
agtgtgaagayaattttttta

SEQ ID NO: 37499 - DNA, 21 bp, Homo sapiens
tctagtttaaycctatctctc

SEQ ID NO: 37500 - DNA, 21 bp, Homo sapiens
tcttagaatgyactggcaaag

SEQ ID NO: 37501 - DNA, 21 bp, Homo sapiens
gttttccttawgtttcctctg

SEQ ID NO: 37502 - DNA, 21 bp, Homo sapiens
agggtaacctrtgtcccccaa

SEQ ID NO: 37503 - DNA, 21 bp, Homo sapiens
gtgctataaamctgtagtggg

SEQ ID NO: 37504 - DNA, 21 bp, Homo sapiens
ttttatgaccwtatatttttc

SEQ ID NO: 37505 - DNA, 21 bp, Homo sapiens
ggcagtattckttgaatgtga

SEQ ID NO: 37506 - DNA, 21 bp, Homo sapiens
atgacttatgygttggtacat

SEQ ID NO: 37507 - DNA, 21 bp, Homo sapiens
tacatttgagkgtactttggt

SEQ ID NO: 37508 - DNA, 21 bp, Homo sapiens
ttagtcttaartgaaatacaa

SEQ ID NO: 37509 - DNA, 21 bp, Homo sapiens
taggactccarctgcatgtgt

SEQ ID NO: 37510 - DNA, 21 bp, Homo sapiens
tccagccacarggtgaaaatc

SEQ ID NO: 37511 - DNA, 21 bp, Homo sapiens
ttaagtagtcrtatcagcctc

SEQ ID NO: 37512 - DNA, 21 bp, Homo sapiens
agttcactttscattagttga

SEQ ID NO: 37513 - DNA, 21 bp, Homo sapiens
ggaattctagwtagaccatat

SEQ ID NO: 37514 - DNA, 21 bp, Homo sapiens
gcaagctaagwcagcatttga

SEQ ID NO: 37515 - DNA, 21 bp, Homo sapiens
gtcgtgatgaytgtatggaga

SEQ ID NO: 37516 - DNA, 21 bp, Homo sapiens
gaatggggttyccatcccctc

SEQ ID NO: 37517 - DNA, 21 bp, Homo sapiens
aacctgttttmggatcctgtt

SEQ ID NO: 37518 - DNA, 21 bp, Homo sapiens
gagtacgtgtygaatcccagt

SEQ ID NO: 37519 - DNA, 21 bp, Homo sapiens
gaggtctgaarttacacctaa

SEQ ID NO: 37520 - DNA, 21 bp, Homo sapiens
ataaggtcccygttagcaaag

SEQ ID NO: 37521 - DNA, 21 bp, Homo sapiens
ctagtttaccrctcagatctc

SEQ ID NO: 37522 - DNA, 21 bp, Homo sapiens
aaattatgaawggatgaatta

SEQ ID NO: 37523 - DNA, 21 bp, Homo sapiens
attgagaaacycttcacagca

SEQ ID NO: 37524 - DNA, 21 bp, Homo sapiens
aaatattctcyagtcactttc

SEQ ID NO: 37525 - DNA, 21 bp, Homo sapiens
gagagagcagytgggaaagaa

SEQ ID NO: 37526 - DNA, 21 bp, Homo sapiens
tacagtacctsagtttctcat

SEQ ID NO: 37527 - DNA, 21 bp, Homo sapiens
tagcaattagkcttgaaccca

SEQ ID NO: 37528 - DNA, 21 bp, Homo sapiens
gaagaagcagstctagcacag

SEQ ID NO: 37529 - DNA, 21 bp, Homo sapiens
ttcattctctytgccctgcat

SEQ ID NO: 37530 - DNA, 21 bp, Homo sapiens
ccatttactcrttcagcaaat

SEQ ID NO: 37531 - DNA, 21 bp, Homo sapiens
taaataaatckcataatatag

SEQ ID NO: 37532 - DNA, 21 bp, Homo sapiens
ctgctttcatytcattatgcc

SEQ ID NO: 37533 - DNA, 21 bp, Homo sapiens
agtttgattayttttaattgt

SEQ ID NO: 37534 - DNA, 21 bp, Homo sapiens
taaatgcccayttgagaccca

SEQ ID NO: 37535 - DNA, 21 bp, Homo sapiens
caaatttcctwacatttcata

SEQ ID NO: 37536 - DNA, 21 bp, Homo sapiens
gtgaggaaggyagtcattaag

SEQ ID NO: 37537 - DNA, 21 bp, Homo sapiens
gactataaackaatatcatag

SEQ ID NO: 37538 - DNA, 21 bp, Homo sapiens
gctaaatgaaygacattgtta

SEQ ID NO: 37539 - DNA, 21 bp, Homo sapiens
tcaggaaaccrttgaactcag

SEQ ID NO: 37540 - DNA, 21 bp, Homo sapiens
cctaattatcrtagtaacttg

SEQ ID NO: 37541 - DNA, 21 bp, Homo sapiens
tcatctggccraggtcattca

SEQ ID NO: 37542 - DNA, 21 bp, Homo sapiens
catgcacgctstcagtggagt

SEQ ID NO: 37543 - DNA, 21 bp, Homo sapiens
cagtggagatycatgtccaag

SEQ ID NO: 37544 - DNA, 21 bp, Homo sapiens
ttagtgaaatygttgtgttaa

SEQ ID NO: 37545 - DNA, 21 bp, Homo sapiens
agtaaaattcyggataatcta

SEQ ID NO: 37546 - DNA, 21 bp, Homo sapiens
ttcatgcattyaactactgtt

SEQ ID NO: 37547 - DNA, 21 bp, Homo sapiens
gaagtatgttmttttattcat

SEQ ID NO: 37548 - DNA, 21 bp, Homo sapiens
attccagtcakgagcagacac

SEQ ID NO: 37549 - DNA, 21 bp, Homo sapiens
ttcactcttcyttccaatgaa

SEQ ID NO: 37550 - DNA, 21 bp, Homo sapiens
ttgcctcgttyaggcgttcag

SEQ ID NO: 37551 - DNA, 21 bp, Homo sapiens
ccagttatcgmcccatctgaa

SEQ ID NO: 37552 - DNA, 21 bp, Homo sapiens
aagtgagtgtyctaaagtcct

SEQ ID NO: 37553 - DNA, 21 bp, Homo sapiens
tttatcatccrgacaagaaat

SEQ ID NO: 37554 - DNA, 21 bp, Homo sapiens
cccaggcaagrcatagagatc

SEQ ID NO: 37555 - DNA, 21 bp, Homo sapiens
tatgggcaagyaccccatgtc

SEQ ID NO: 37556 - DNA, 21 bp, Homo sapiens
tcccgattggyccttctccac

SEQ ID NO: 37557 - DNA, 21 bp, Homo sapiens
gaaaccaggamggatgataac

SEQ ID NO: 37558 - DNA, 21 bp, Homo sapiens
ctcagatttcrgtatctagct

SEQ ID NO: 37559 - DNA, 21 bp, Homo sapiens
catagcaccgragctcccttc

SEQ ID NO: 37560 - DNA, 21 bp, Homo sapiens
tcatcagaagrtattacactt

SEQ ID NO: 37561 - DNA, 21 bp, Homo sapiens
ggttttttttwaatgtgcaca

SEQ ID NO: 37562 - DNA, 21 bp, Homo sapiens
caatagtcccktagctaacaa

SEQ ID NO: 37563 - DNA, 21 bp, Homo sapiens
tgaccagcatwccttgttgtt

SEQ ID NO: 37564 - DNA, 21 bp, Homo sapiens
gcccgctgcgyattcggagta

SEQ ID NO: 37565 - DNA, 21 bp, Homo sapiens
ccttggtcccrgtggagcagc

SEQ ID NO: 37566 - DNA, 21 bp, Homo sapiens
caaagttcagrtgggaagtag

SEQ ID NO: 37567 - DNA, 21 bp, Homo sapiens
cacaaggtctstcactgtctc

SEQ ID NO: 37568 - DNA, 21 bp, Homo sapiens
aaaatctgacwttagactttt

SEQ ID NO: 37569 - DNA, 21 bp, Homo sapiens
aacgaagtctrtgctgtttgt

SEQ ID NO: 37570 - DNA, 21 bp, Homo sapiens
aactcttaagwccataagccc

SEQ ID NO: 37571 - DNA, 21 bp, Homo sapiens
gctggatcacwgttttctgtc

SEQ ID NO: 37572 - DNA, 21 bp, Homo sapiens
cttgcaccttyctctttctgt

SEQ ID NO: 37573 - DNA, 21 bp, Homo sapiens
gtgcaagtacrgaaggcgtct

SEQ ID NO: 37574 - DNA, 21 bp, Homo sapiens
atacaagggtwgaactggtta

SEQ ID NO: 37575 - DNA, 21 bp, Homo sapiens
tggctcagatytttgtaggct

SEQ ID NO: 37576 - DNA, 21 bp, Homo sapiens
cctttacgatytctagagggg

SEQ ID NO: 37577 - DNA, 21 bp, Homo sapiens
ctgtatcatcytccatgatat

SEQ ID NO: 37578 - DNA, 21 bp, Homo sapiens
ggtggttgtarggagtcatta

SEQ ID NO: 37579 - DNA, 21 bp, Homo sapiens
cagacagtatygtatttatca

SEQ ID NO: 37580 - DNA, 21 bp, Homo sapiens
gacctggcacygctaccctaa

SEQ ID NO: 37581 - DNA, 21 bp, Homo sapiens
attaataagtwttgatactgg

SEQ ID NO: 37582 - DNA, 21 bp, Homo sapiens
gaatatacttsccatatgaac

SEQ ID NO: 37583 - DNA, 21 bp, Homo sapiens
gtcgtctttcrttcaggcttc

SEQ ID NO: 37584 - DNA, 21 bp, Homo sapiens
ctgccaccaayaatggctctg

SEQ ID NO: 37585 - DNA, 21 bp, Homo sapiens
gccacaaaggrcagcgagtgt

SEQ ID NO: 37586 - DNA, 21 bp, Homo sapiens
acaaggaggasagtctgagca

SEQ ID NO: 37587 - DNA, 21 bp, Homo sapiens
gtatttcaccwgtctctggaa

SEQ ID NO: 37588 - DNA, 21 bp, Homo sapiens
catttggtttygcttgggaga

SEQ ID NO: 37589 - DNA, 21 bp, Homo sapiens
gagggatgccrattttcagca

SEQ ID NO: 37590 - DNA, 21 bp, Homo sapiens
tggactggtaycttgcataca

SEQ ID NO: 37591 - DNA, 21 bp, Homo sapiens
aaattacgttrcaattgataa

SEQ ID NO: 37592 - DNA, 21 bp, Homo sapiens
ttaggatatamgaaattgcca

SEQ ID NO: 37593 - DNA, 21 bp, Homo sapiens
atctctatatycatgtgaatt

SEQ ID NO: 37594 - DNA, 21 bp, Homo sapiens
ctcctgctgarccacagcact

SEQ ID NO: 37595 - DNA, 21 bp, Homo sapiens
tcaacaccacragatatttcc

SEQ ID NO: 37596 - DNA, 21 bp, Homo sapiens
ggccattgttrttattgttgc

SEQ ID NO: 37597 - DNA, 21 bp, Homo sapiens
tctcagtaacsgatcagagaa

SEQ ID NO: 37598 - DNA, 21 bp, Homo sapiens
gataccacaayttcagatatt

SEQ ID NO: 37599 - DNA, 21 bp, Homo sapiens
tggatgctgakgtatggagcc

SEQ ID NO: 37600 - DNA, 21 bp, Homo sapiens
ggggaacggayagcccaggag

SEQ ID NO: 37601 - DNA, 21 bp, Homo sapiens
cacagtgcccratcctgagga

SEQ ID NO: 37602 - DNA, 21 bp, Homo sapiens
tggtccagagmacgcagcagg

SEQ ID NO: 37603 - DNA, 21 bp, Homo sapiens
cctcaggtggrtgactcatgg

SEQ ID NO: 37604 - DNA, 21 bp, Homo sapiens
gcactctgggygagggttccc

SEQ ID NO: 37605 - DNA, 21 bp, Homo sapiens
gagccccttcsaagtcaaacc

SEQ ID NO: 37606 - DNA, 21 bp, Homo sapiens
cacaaacctgycatataaagt

SEQ ID NO: 37607 - DNA, 21 bp, Homo sapiens
ttaggccggcrctcgctccct

SEQ ID NO: 37608 - DNA, 21 bp, Homo sapiens
aatcattagawaagaaagcaa

SEQ ID NO: 37609 - DNA, 21 bp, Homo sapiens
actccaaaaayaatatgtttc

SEQ ID NO: 37610 - DNA, 21 bp, Homo sapiens
caattgtctcwacttattttg

SEQ ID NO: 37611 - DNA, 21 bp, Homo sapiens
ctatacagtgytcacaagaaa

SEQ ID NO: 37612 - DNA, 21 bp, Homo sapiens
tacactagtaytgacacgaaa

SEQ ID NO: 37613 - DNA, 21 bp, Homo sapiens
ctgcctaaaaractaatctta

SEQ ID NO: 37614 - DNA, 21 bp, Homo sapiens
cactcaagtcyatccacaaat

SEQ ID NO: 37615 - DNA, 21 bp, Homo sapiens
gatacatccayggctcagcac

SEQ ID NO: 37616 - DNA, 21 bp, Homo sapiens
catgaatactrcagatctcac

SEQ ID NO: 37617 - DNA, 21 bp, Homo sapiens
caatccttacrcaggcctgtc

SEQ ID NO: 37618 - DNA, 21 bp, Homo sapiens
acacctttggytctatcaact

SEQ ID NO: 37619 - DNA, 21 bp, Homo sapiens
tgaaaaaattrtcaaagaatc

SEQ ID NO: 37620 - DNA, 21 bp, Homo sapiens
cagctcttcayggtataattg

SEQ ID NO: 37621 - DNA, 21 bp, Homo sapiens
cctgcaccaasactcagcagc

SEQ ID NO: 37622 - DNA, 21 bp, Homo sapiens
agtttgtgctygctgtttttt

SEQ ID NO: 37623 - DNA, 21 bp, Homo sapiens
ctgatagaaarcattcttaaa

SEQ ID NO: 37624 - DNA, 21 bp, Homo sapiens
attttaaggarttgtactttg

SEQ ID NO: 37625 - DNA, 21 bp, Homo sapiens
aggctaaatgktggcatccct

SEQ ID NO: 37626 - DNA, 21 bp, Homo sapiens
ttaaatagtgytccgaaagcc

SEQ ID NO: 37627 - DNA, 21 bp, Homo sapiens
agtcagaggaracacctactg

SEQ ID NO: 37628 - DNA, 21 bp, Homo sapiens
tggcattatarcctgaaaaaa

SEQ ID NO: 37629 - DNA, 21 bp, Homo sapiens
tggctctaccyggtgccattt

SEQ ID NO: 37630 - DNA, 21 bp, Homo sapiens
aactggacatyggagcggaat

SEQ ID NO: 37631 - DNA, 21 bp, Homo sapiens
agatggagacrgtgtagaagg

SEQ ID NO: 37632 - DNA, 21 bp, Homo sapiens
gaaatgcagcygtggattggg

SEQ ID NO: 37633 - DNA, 21 bp, Homo sapiens
taataccatcrtcagaaatcc

SEQ ID NO: 37634 - DNA, 21 bp, Homo sapiens
atgaaagctgycttgcctaag

SEQ ID NO: 37635 - DNA, 21 bp, Homo sapiens
aatgaaaagakccctaattgt

SEQ ID NO: 37636 - DNA, 21 bp, Homo sapiens
tgtcctaaacwtagaaaagga

SEQ ID NO: 37637 - DNA, 21 bp, Homo sapiens
taatctctgtrtcctgcatca

SEQ ID NO: 37638 - DNA, 21 bp, Homo sapiens
gcacaggtatycttggagact

SEQ ID NO: 37639 - DNA, 21 bp, Homo sapiens
ccttaaccackgacaacaatg

SEQ ID NO: 37640 - DNA, 21 bp, Homo sapiens
tgcagcccagrgccactaaaa

SEQ ID NO: 37641 - DNA, 21 bp, Homo sapiens
aaaaatgagaratcatcgtac

SEQ ID NO: 37642 - DNA, 21 bp, Homo sapiens
taaaaaatcartaagtgaaca

SEQ ID NO: 37643 - DNA, 21 bp, Homo sapiens
atgcacatacrcagagaagga

SEQ ID NO: 37644 - DNA, 21 bp, Homo sapiens
cttgcttgcartgccacaatc

SEQ ID NO: 37645 - DNA, 21 bp, Homo sapiens
cagtgcctttwtgagtcggga

SEQ ID NO: 37646 - DNA, 21 bp, Homo sapiens
cttctttattyaaaagtcaac

SEQ ID NO: 37647 - DNA, 21 bp, Homo sapiens
tgtaggtttcrtgctacagag

SEQ ID NO: 37648 - DNA, 21 bp, Homo sapiens
tctttctcctyatgtaaatat

SEQ ID NO: 37649 - DNA, 21 bp, Homo sapiens
atgaaatggtraatgccctcc

SEQ ID NO: 37650 - DNA, 21 bp, Homo sapiens
tttcatactcygagagctact

SEQ ID NO: 37651 - DNA, 21 bp, Homo sapiens
cttgccacaayaagaataaga

SEQ ID NO: 37652 - DNA, 21 bp, Homo sapiens
ggcttatcaartgggtcagaa

SEQ ID NO: 37653 - DNA, 21 bp, Homo sapiens
ctctgatgcaytatccaagac

SEQ ID NO: 37654 - DNA, 21 bp, Homo sapiens
gctctaacatrtagtctgctg

SEQ ID NO: 37655 - DNA, 21 bp, Homo sapiens
ctcacaggtaygcggcgcttc

SEQ ID NO: 37656 - DNA, 21 bp, Homo sapiens
gggtccggagyggcttcttgg

SEQ ID NO: 37657 - DNA, 21 bp, Homo sapiens
taagtggctgsaactgttgtg

SEQ ID NO: 37658 - DNA, 21 bp, Homo sapiens
acacatgtttmaataatgttt

SEQ ID NO: 37659 - DNA, 21 bp, Homo sapiens
tggtgcccccrtgctttggtc

SEQ ID NO: 37660 - DNA, 21 bp, Homo sapiens
cagcctgctgracatctggga

SEQ ID NO: 37661 - DNA, 21 bp, Homo sapiens
atggcactggmacatcttggg

SEQ ID NO: 37662 - DNA, 21 bp, Homo sapiens
actgggcaggwacacattttt

SEQ ID NO: 37663 - DNA, 21 bp, Homo sapiens
tgggtgaaaaygcctttcctc

SEQ ID NO: 37664 - DNA, 21 bp, Homo sapiens
gaaacgaggcrtagtgggcac

SEQ ID NO: 37665 - DNA, 21 bp, Homo sapiens
ctggagagcaytggtgacaac

SEQ ID NO: 37666 - DNA, 21 bp, Homo sapiens
attcccccaaytcctggccac

SEQ ID NO: 37667 - DNA, 21 bp, Homo sapiens
atgtatttatscttatgtcaa

SEQ ID NO: 37668 - DNA, 21 bp, Homo sapiens
tctaagagagkagagtaggac

SEQ ID NO: 37669 - DNA, 21 bp, Homo sapiens
acggccctgcrctcagttaat

SEQ ID NO: 37670 - DNA, 21 bp, Homo sapiens
cattcattcaraaacttatcc

SEQ ID NO: 37671 - DNA, 21 bp, Homo sapiens
agatgtatggyttcaggctct

SEQ ID NO: 37672 - DNA, 21 bp, Homo sapiens
atctactatgygcctacagtg

SEQ ID NO: 37673 - DNA, 21 bp, Homo sapiens
agtaccatgtrcgcccatgtc

SEQ ID NO: 37674 - DNA, 21 bp, Homo sapiens
tggggtgaagygcccctgtgt

SEQ ID NO: 37675 - DNA, 21 bp, Homo sapiens
tttagatccayactgtcccaa

SEQ ID NO: 37676 - DNA, 21 bp, Homo sapiens
atctgagtatsaattttagct

SEQ ID NO: 37677 - DNA, 21 bp, Homo sapiens
ggcattgaggyactttcatta

SEQ ID NO: 37678 - DNA, 21 bp, Homo sapiens
aatttcaatayatcttggtta

SEQ ID NO: 37679 - DNA, 21 bp, Homo sapiens
ctacatttttkataatgttct

SEQ ID NO: 37680 - DNA, 21 bp, Homo sapiens
tctgtgatgtytctaccacaa

SEQ ID NO: 37681 - DNA, 21 bp, Homo sapiens
gacagtgttcyatcccacgtg

SEQ ID NO: 37682 - DNA, 21 bp, Homo sapiens
ctgtatagccmaataaactga

SEQ ID NO: 37683 - DNA, 21 bp, Homo sapiens
cttgaaaataygagtgggcat

SEQ ID NO: 37684 - DNA, 21 bp, Homo sapiens
gagggtgctarggattggaat

SEQ ID NO: 37685 - DNA, 21 bp, Homo sapiens
tccaaacacamggatggactt

SEQ ID NO: 37686 - DNA, 21 bp, Homo sapiens
tataaatttgrcaactttgat

SEQ ID NO: 37687 - DNA, 21 bp, Homo sapiens
cttattccacrggaacaaagg

SEQ ID NO: 37688 - DNA, 21 bp, Homo sapiens
agattctcaaytagtttttgc

SEQ ID NO: 37689 - DNA, 21 bp, Homo sapiens
agtctgtcagraccatgtaca

SEQ ID NO: 37690 - DNA, 21 bp, Homo sapiens
tgatttaaacrctaactggtg

SEQ ID NO: 37691 - DNA, 21 bp, Homo sapiens
acaccttatcrcatgggagaa

SEQ ID NO: 37692 - DNA, 21 bp, Homo sapiens
ccctcactttscttccctggt

SEQ ID NO: 37693 - DNA, 21 bp, Homo sapiens
gtattgagaaygctccagtga

SEQ ID NO: 37694 - DNA, 21 bp, Homo sapiens
agctttgacaragattccaag

SEQ ID NO: 37695 - DNA, 21 bp, Homo sapiens
ccctgtgcaaygtggagagca

SEQ ID NO: 37696 - DNA, 21 bp, Homo sapiens
acagagctttmtcatcaccta

SEQ ID NO: 37697 - DNA, 21 bp, Homo sapiens
ctcccaggtgygccccaggag

SEQ ID NO: 37698 - DNA, 21 bp, Homo sapiens
gacagtccagrtgaataattt

SEQ ID NO: 37699 - DNA, 21 bp, Homo sapiens
tgatttatctmcacagatttc

SEQ ID NO: 37700 - DNA, 21 bp, Homo sapiens
gttcagtctcyttttggaagg

SEQ ID NO: 37701 - DNA, 21 bp, Homo sapiens
tatttttattyagcaactttg

SEQ ID NO: 37702 - DNA, 21 bp, Homo sapiens
tcacagttatrtggtgttgac

SEQ ID NO: 37703 - DNA, 21 bp, Homo sapiens
catttaagcawtaaggttttc

SEQ ID NO: 37704 - DNA, 21 bp, Homo sapiens
ctggttaatcygttggcattg

SEQ ID NO: 37705 - DNA, 21 bp, Homo sapiens
aaaatcctgcrttcctactgt

SEQ ID NO: 37706 - DNA, 21 bp, Homo sapiens
gggttgatggycccttaatta

SEQ ID NO: 37707 - DNA, 21 bp, Homo sapiens
tgctttaagcrgtacttccat

SEQ ID NO: 37708 - DNA, 21 bp, Homo sapiens
ggacatgtatrgggctgatta

SEQ ID NO: 37709 - DNA, 21 bp, Homo sapiens
ctaaaggatayagagactagt

SEQ ID NO: 37710 - DNA, 21 bp, Homo sapiens
attataatagrgacagttgct

SEQ ID NO: 37711 - DNA, 21 bp, Homo sapiens
ttttagtggtygaaggcactc

SEQ ID NO: 37712 - DNA, 21 bp, Homo sapiens
atcttccttcycttttgctag

SEQ ID NO: 37713 - DNA, 21 bp, Homo sapiens
gtaggtagatyctaaatgctt

SEQ ID NO: 37714 - DNA, 21 bp, Homo sapiens
agcatgaacarcaggacaaaa

SEQ ID NO: 37715 - DNA, 21 bp, Homo sapiens
ttgacccaccrcgcgcgaccc

SEQ ID NO: 37716 - DNA, 21 bp, Homo sapiens
gttacaaattkcttgagatga

SEQ ID NO: 37717 - DNA, 21 bp, Homo sapiens
tagaatttcamacagtaaaga

SEQ ID NO: 37718 - DNA, 21 bp, Homo sapiens
ttgagtcttgrtctctcatgc

SEQ ID NO: 37719 - DNA, 21 bp, Homo sapiens
aaaagtctcaytcttgtagat

SEQ ID NO: 37720 - DNA, 21 bp, Homo sapiens
aaccagaaatwaacaaaactt

SEQ ID NO: 37721 - DNA, 21 bp, Homo sapiens
gaaaatttatkctgactactt

SEQ ID NO: 37722 - DNA, 21 bp, Homo sapiens
ttgaaaacagrgtgagggaag

SEQ ID NO: 37723 - DNA, 21 bp, Homo sapiens
ttctctgtaawactggtatct

SEQ ID NO: 37724 - DNA, 21 bp, Homo sapiens
agtacctattycttttttaat

SEQ ID NO: 37725 - DNA, 21 bp, Homo sapiens
atgtgacaacstcaactattc

SEQ ID NO: 37726 - DNA, 21 bp, Homo sapiens
ctagaaacgaytctaaattga

SEQ ID NO: 37727 - DNA, 21 bp, Homo sapiens
gctagctatcrgaaaggacca

SEQ ID NO: 37728 - DNA, 21 bp, Homo sapiens
ctcaggatcayactgcctaat

SEQ ID NO: 37729 - DNA, 21 bp, Homo sapiens
aagcactaccrgttgtggcaa

SEQ ID NO: 37730 - DNA, 21 bp, Homo sapiens
tttttgtgagygattaagttt

SEQ ID NO: 37731 - DNA, 21 bp, Homo sapiens
cctagataatkctataaaaga

SEQ ID NO: 37732 - DNA, 21 bp, Homo sapiens
atattgctaayatttctaaat

SEQ ID NO: 37733 - DNA, 21 bp, Homo sapiens
gctaggatcaycttgtcacta

SEQ ID NO: 37734 - DNA, 21 bp, Homo sapiens
acagaacttaygccatcaaag

SEQ ID NO: 37735 - DNA, 21 bp, Homo sapiens
gcaagcactgkaatgggcatt

SEQ ID NO: 37736 - DNA, 21 bp, Homo sapiens
gttaatgaatrctatgaatac

SEQ ID NO: 37737 - DNA, 21 bp, Homo sapiens
tacctagaatrttcacacttt

SEQ ID NO: 37738 - DNA, 21 bp, Homo sapiens
taccaacaacycctcattcac

SEQ ID NO: 37739 - DNA, 21 bp, Homo sapiens
agaagtgatarcaacacctag

SEQ ID NO: 37740 - DNA, 21 bp, Homo sapiens
tcctacctccrattacataat

SEQ ID NO: 37741 - DNA, 21 bp, Homo sapiens
ttcggagtcaytaccaataac

SEQ ID NO: 37742 - DNA, 21 bp, Homo sapiens
acaacagtacmtggtacaatt

SEQ ID NO: 37743 - DNA, 21 bp, Homo sapiens
ctaaggcatayggacatgtgc

SEQ ID NO: 37744 - DNA, 21 bp, Homo sapiens
gagtctatgcytaagtctcca

SEQ ID NO: 37745 - DNA, 21 bp, Homo sapiens
tattgtaaatkgtggttttaa

SEQ ID NO: 37746 - DNA, 21 bp, Homo sapiens
attattggctrttgtcagtgg

SEQ ID NO: 37747 - DNA, 21 bp, Homo sapiens
attgtcagcayacctatttcc

SEQ ID NO: 37748 - DNA, 21 bp, Homo sapiens
attgccttgayagcatatgca

SEQ ID NO: 37749 - DNA, 21 bp, Homo sapiens
tttaacaatgsttagaggatg

SEQ ID NO: 37750 - DNA, 21 bp, Homo sapiens
atcactgtccstgatctttga

SEQ ID NO: 37751 - DNA, 21 bp, Homo sapiens
ctgacagaacwgtaaccatga

SEQ ID NO: 37752 - DNA, 21 bp, Homo sapiens
attagactcartgaattttgt

SEQ ID NO: 37753 - DNA, 21 bp, Homo sapiens
tgtaaggtaawttagacaggt

SEQ ID NO: 37754 - DNA, 21 bp, Homo sapiens
aatccattcaragcaattttc

SEQ ID NO: 37755 - DNA, 21 bp, Homo sapiens
gaagaaagcaygaaccacaat

SEQ ID NO: 37756 - DNA, 21 bp, Homo sapiens
atgctccatcrattatttctt

SEQ ID NO: 37757 - DNA, 21 bp, Homo sapiens
tctgttttttyagacggtcaa

SEQ ID NO: 37758 - DNA, 21 bp, Homo sapiens
tttacacctgstgggtttatg

SEQ ID NO: 37759 - DNA, 21 bp, Homo sapiens
tggttttcttyatgccttttc

SEQ ID NO: 37760 - DNA, 21 bp, Homo sapiens
gatcctgttamaattgaaagg

SEQ ID NO: 37761 - DNA, 21 bp, Homo sapiens
cctcagtgatrtcctacaatt

SEQ ID NO: 37762 - DNA, 21 bp, Homo sapiens
aaacgcaaatrcaacagaaac

SEQ ID NO: 37763 - DNA, 21 bp, Homo sapiens
ctccatgtacragcctaatga

SEQ ID NO: 37764 - DNA, 21 bp, Homo sapiens
ttagagaatamtgcaggatat

SEQ ID NO: 37765 - DNA, 21 bp, Homo sapiens
atcttattccraataattagg

SEQ ID NO: 37766 - DNA, 21 bp, Homo sapiens
cagtagaaaaraagtcataca

SEQ ID NO: 37767 - DNA, 21 bp, Homo sapiens
ataaaccattwtgcactgtag

SEQ ID NO: 37768 - DNA, 21 bp, Homo sapiens
cctcctgagawtgataaaagc

SEQ ID NO: 37769 - DNA, 21 bp, Homo sapiens
cgtgaagtaayacactgacag

SEQ ID NO: 37770 - DNA, 21 bp, Homo sapiens
taagtccctgrtggaatacta

SEQ ID NO: 37771 - DNA, 21 bp, Homo sapiens
taatctaaatytagggacatc

SEQ ID NO: 37772 - DNA, 21 bp, Homo sapiens
tgtttcaaacyccttcggtgt

SEQ ID NO: 37773 - DNA, 21 bp, Homo sapiens
cttcaaagggwtatataaatc

SEQ ID NO: 37774 - DNA, 21 bp, Homo sapiens
gccaaaccagractctatttt

SEQ ID NO: 37775 - DNA, 21 bp, Homo sapiens
acatccttttytccctcttgg

SEQ ID NO: 37776 - DNA, 21 bp, Homo sapiens
gaatttcactstctaagcccc

SEQ ID NO: 37777 - DNA, 21 bp, Homo sapiens
gaagtatgaaraaacttcttg

SEQ ID NO: 37778 - DNA, 21 bp, Homo sapiens
cagcaaaaaaycgtgtatatg

SEQ ID NO: 37779 - DNA, 21 bp, Homo sapiens
aaaatgattaygacatgattt

SEQ ID NO: 37780 - DNA, 21 bp, Homo sapiens
ctcttgtgaakgtggggaagt

SEQ ID NO: 37781 - DNA, 21 bp, Homo sapiens
agatacggtaytgaaattaaa

SEQ ID NO: 37782 - DNA, 21 bp, Homo sapiens
attggtaatgygaaggttctt

SEQ ID NO: 37783 - DNA, 21 bp, Homo sapiens
accttatgttscaggtaccat

SEQ ID NO: 37784 - DNA, 21 bp, Homo sapiens
atggtagaaargatggattta

SEQ ID NO: 37785 - DNA, 21 bp, Homo sapiens
gatttggagtyacaccactag

SEQ ID NO: 37786 - DNA, 21 bp, Homo sapiens
actctaaagcygaagaggtta

SEQ ID NO: 37787 - DNA, 21 bp, Homo sapiens
acgaatctggraggccacagc

SEQ ID NO: 37788 - DNA, 21 bp, Homo sapiens
atttaaagccyttcagacaga

SEQ ID NO: 37789 - DNA, 21 bp, Homo sapiens
tactataaatrttctttttgt

SEQ ID NO: 37790 - DNA, 21 bp, Homo sapiens
atacataaagrtgatagagtt

SEQ ID NO: 37791 - DNA, 21 bp, Homo sapiens
ggaaactaggwtatataattt

SEQ ID NO: 37792 - DNA, 21 bp, Homo sapiens
atatatttttkcaactgttca

SEQ ID NO: 37793 - DNA, 21 bp, Homo sapiens
ctgagctcttstgaccccagc

SEQ ID NO: 37794 - DNA, 21 bp, Homo sapiens
ttcaaagttcwctagccctta

SEQ ID NO: 37795 - DNA, 21 bp, Homo sapiens
tttttatgatygttttaaatt

SEQ ID NO: 37796 - DNA, 21 bp, Homo sapiens
acctcccattrtgcaaccttt

SEQ ID NO: 37797 - DNA, 21 bp, Homo sapiens
catatttatgraatgtctttt

SEQ ID NO: 37798 - DNA, 21 bp, Homo sapiens
gtttgataggyatagacagaa

SEQ ID NO: 37799 - DNA, 21 bp, Homo sapiens
gctctacaagrcagggagact

SEQ ID NO: 37800 - DNA, 21 bp, Homo sapiens
aatattgccartgtagccatg

SEQ ID NO: 37801 - DNA, 21 bp, Homo sapiens
tttcttgttaytattttgtaa

SEQ ID NO: 37802 - DNA, 21 bp, Homo sapiens
gtggaagaatytagtgacatt

SEQ ID NO: 37803 - DNA, 21 bp, Homo sapiens
ggatattcagmgatcttattt

SEQ ID NO: 37804 - DNA, 21 bp, Homo sapiens
ttccatcttakgatgctcatt

SEQ ID NO: 37805 - DNA, 21 bp, Homo sapiens
ctggaaacaarctcaagcatt

SEQ ID NO: 37806 - DNA, 21 bp, Homo sapiens
tattgcagtgytatggactac

SEQ ID NO: 37807 - DNA, 21 bp, Homo sapiens
taatgagcttycgggacactg

SEQ ID NO: 37808 - DNA, 21 bp, Homo sapiens
tggttgacatrtgcccaaata

SEQ ID NO: 37809 - DNA, 21 bp, Homo sapiens
agtatacaaartgtcttcaaa

SEQ ID NO: 37810 - DNA, 21 bp, Homo sapiens
atgctaactcmggtcctaagt

SEQ ID NO: 37811 - DNA, 21 bp, Homo sapiens
gacctgacttygggaaatact

SEQ ID NO: 37812 - DNA, 21 bp, Homo sapiens
acgcttctttytactccagtt

SEQ ID NO: 37813 - DNA, 21 bp, Homo sapiens
aatgttgccgygttattgtta

SEQ ID NO: 37814 - DNA, 21 bp, Homo sapiens
aggaaaagcarggctcagggc

SEQ ID NO: 37815 - DNA, 21 bp, Homo sapiens
tgcaccctgaytgggcatggg

SEQ ID NO: 37816 - DNA, 21 bp, Homo sapiens
tcatgcaatcytcttatgagg

SEQ ID NO: 37817 - DNA, 21 bp, Homo sapiens
gggggaggagrtgcccctgca

SEQ ID NO: 37818 - DNA, 21 bp, Homo sapiens
caagtacttcwtattacattt

SEQ ID NO: 37819 - DNA, 21 bp, Homo sapiens
aggatgagaartttctttacc

SEQ ID NO: 37820 - DNA, 21 bp, Homo sapiens
tgaaggagaargccacagggc

SEQ ID NO: 37821 - DNA, 21 bp, Homo sapiens
gtctcttgccstggttttaat

SEQ ID NO: 37822 - DNA, 21 bp, Homo sapiens
ctgagaatgckgagagtttta

SEQ ID NO: 37823 - DNA, 21 bp, Homo sapiens
tgtataaaggygaacaaagga

SEQ ID NO: 37824 - DNA, 21 bp, Homo sapiens
agacctgcacratgaaggaag

SEQ ID NO: 37825 - DNA, 21 bp, Homo sapiens
aaaatatggcrttagaaactt

SEQ ID NO: 37826 - DNA, 21 bp, Homo sapiens
tgttaagacaygccttcgttc

SEQ ID NO: 37827 - DNA, 21 bp, Homo sapiens
ttgaatcatcygtgttctgtt

SEQ ID NO: 37828 - DNA, 21 bp, Homo sapiens
cctgagtgtcmtgccaaggtc

SEQ ID NO: 37829 - DNA, 21 bp, Homo sapiens
ttactctctamagtcacaatt

SEQ ID NO: 37830 - DNA, 21 bp, Homo sapiens
attttttaggkacacggatct

SEQ ID NO: 37831 - DNA, 21 bp, Homo sapiens
ggtccacactrtgagagttac

SEQ ID NO: 37832 - DNA, 21 bp, Homo sapiens
ctgacatggaygttggctccc

SEQ ID NO: 37833 - DNA, 21 bp, Homo sapiens
gtgtctcattkaaaacggttc

SEQ ID NO: 37834 - DNA, 21 bp, Homo sapiens
ttgtacacacragaacacgga

SEQ ID NO: 37835 - DNA, 21 bp, Homo sapiens
aaaacaagacycctgagttcc

SEQ ID NO: 37836 - DNA, 21 bp, Homo sapiens
gttactttgayttgccagcta

SEQ ID NO: 37837 - DNA, 21 bp, Homo sapiens
ggaggaattgmtctgtgcgtt

SEQ ID NO: 37838 - DNA, 21 bp, Homo sapiens
ctcagcagccrttcatgcacg

SEQ ID NO: 37839 - DNA, 21 bp, Homo sapiens
gccaccttacrtttctctgaa

SEQ ID NO: 37840 - DNA, 21 bp, Homo sapiens
gagtttgaggkcaagggtgtt

SEQ ID NO: 37841 - DNA, 21 bp, Homo sapiens
tcatgctagcygtggggccag

SEQ ID NO: 37842 - DNA, 21 bp, Homo sapiens
tgattggatgrtaattgtgaa

SEQ ID NO: 37843 - DNA, 21 bp, Homo sapiens
agattgccatygtctcgtttc

SEQ ID NO: 37844 - DNA, 21 bp, Homo sapiens
ctggttggaaygtggggacac

SEQ ID NO: 37845 - DNA, 21 bp, Homo sapiens
aattcctgccygccgggttca

SEQ ID NO: 37846 - DNA, 21 bp, Homo sapiens
ccctggagagrccgttcagtt

SEQ ID NO: 37847 - DNA, 21 bp, Homo sapiens
aagtgcgttckctaagcaaca

SEQ ID NO: 37848 - DNA, 21 bp, Homo sapiens
agcagcatggkttagaactga

SEQ ID NO: 37849 - DNA, 21 bp, Homo sapiens
ctaatgcactscaatgctcag

SEQ ID NO: 37850 - DNA, 21 bp, Homo sapiens
gcctttctctyggatcatttg

SEQ ID NO: 37851 - DNA, 21 bp, Homo sapiens
aagaggcagakctttggctag

SEQ ID NO: 37852 - DNA, 21 bp, Homo sapiens
agtgatacctmacttagtctc

SEQ ID NO: 37853 - DNA, 21 bp, Homo sapiens
gcctggttcaygcctctcaag

SEQ ID NO: 37854 - DNA, 21 bp, Homo sapiens
gcaatcttaastatccaaaca

SEQ ID NO: 37855 - DNA, 21 bp, Homo sapiens
agctaggagtsgaattcagag

SEQ ID NO: 37856 - DNA, 21 bp, Homo sapiens
attggaaatgyggaattcttt

SEQ ID NO: 37857 - DNA, 21 bp, Homo sapiens
cattgggaaaytgcctttttg

SEQ ID NO: 37858 - DNA, 21 bp, Homo sapiens
cctacatttamcctgagttac

SEQ ID NO: 37859 - DNA, 21 bp, Homo sapiens
ccatttggtcrttttttactc

SEQ ID NO: 37860 - DNA, 21 bp, Homo sapiens
caaatgcccasaatgcacctg

SEQ ID NO: 37861 - DNA, 21 bp, Homo sapiens
atgcctagagkgctgtgcttc

SEQ ID NO: 37862 - DNA, 21 bp, Homo sapiens
gtgccacttcytgcctggctt

SEQ ID NO: 37863 - DNA, 21 bp, Homo sapiens
acacgaaatarctagtatgtc

SEQ ID NO: 37864 - DNA, 21 bp, Homo sapiens
catgctaaatrttacaggcac

SEQ ID NO: 37865 - DNA, 21 bp, Homo sapiens
tggtaagggcrtgttgcaagg

SEQ ID NO: 37866 - DNA, 21 bp, Homo sapiens
cggccagacayacaggacgag

SEQ ID NO: 37867 - DNA, 21 bp, Homo sapiens
ccaggtccttytctcgtctct

SEQ ID NO: 37868 - DNA, 21 bp, Homo sapiens
ccatggcgcargtcaccatct

SEQ ID NO: 37869 - DNA, 21 bp, Homo sapiens
ttcagttgtayattgttccag

SEQ ID NO: 37870 - DNA, 21 bp, Homo sapiens
ctccaaattartgtagacctt

SEQ ID NO: 37871 - DNA, 21 bp, Homo sapiens
ttaattctacytgatagccat

SEQ ID NO: 37872 - DNA, 21 bp, Homo sapiens
gatacaggaaycctggccccg

SEQ ID NO: 37873 - DNA, 21 bp, Homo sapiens
tcgttattcartgcggtttta

SEQ ID NO: 37874 - DNA, 21 bp, Homo sapiens
tgtcacctccyccacctctct

SEQ ID NO: 37875 - DNA, 21 bp, Homo sapiens
tctaatgacamccacccccga

SEQ ID NO: 37876 - DNA, 21 bp, Homo sapiens
tggtacattgkgggtgcatcc

SEQ ID NO: 37877 - DNA, 21 bp, Homo sapiens
ggggccacgcrcctgacctca

SEQ ID NO: 37878 - DNA, 21 bp, Homo sapiens
tactaagttaytgcacacctc

SEQ ID NO: 37879 - DNA, 21 bp, Homo sapiens
ccaggagttcragaccagcct

SEQ ID NO: 37880 - DNA, 21 bp, Homo sapiens
ctttcctcctstttctctcca

SEQ ID NO: 37881 - DNA, 21 bp, Homo sapiens
gagggcccccragcctgtccg

SEQ ID NO: 37882 - DNA, 21 bp, Homo sapiens
ccccactctckgagcacaaag

SEQ ID NO: 37883 - DNA, 21 bp, Homo sapiens
ttcatgggctmttatagatga

SEQ ID NO: 37884 - DNA, 21 bp, Homo sapiens
gtctattcaayatacagtcct

SEQ ID NO: 37885 - DNA, 21 bp, Homo sapiens
gcctggaaaarataaggttaa

SEQ ID NO: 37886 - DNA, 21 bp, Homo sapiens
tgagttagcgratggacatta

SEQ ID NO: 37887 - DNA, 21 bp, Homo sapiens
gaaatacacartgggttctct

SEQ ID NO: 37888 - DNA, 21 bp, Homo sapiens
aaatgagccasttatcacagt

SEQ ID NO: 37889 - DNA, 21 bp, Homo sapiens
catgttcaggyaacactaata

SEQ ID NO: 37890 - DNA, 21 bp, Homo sapiens
tctcttaggtktcctgaggtc

SEQ ID NO: 37891 - DNA, 21 bp, Homo sapiens
caaatttttcrtaccatagga

SEQ ID NO: 37892 - DNA, 21 bp, Homo sapiens
taaatgagatkcccaggtatt

SEQ ID NO: 37893 - DNA, 21 bp, Homo sapiens
aaggacacacmcaatcttcca

SEQ ID NO: 37894 - DNA, 21 bp, Homo sapiens
gaatgacagtsttttctctgt

SEQ ID NO: 37895 - DNA, 21 bp, Homo sapiens
aacagtactgytgggtgaggg

SEQ ID NO: 37896 - DNA, 21 bp, Homo sapiens
tgtaacttcaytgaagcaatt

SEQ ID NO: 37897 - DNA, 21 bp, Homo sapiens
tgaagaactamgatggaatga

SEQ ID NO: 37898 - DNA, 21 bp, Homo sapiens
tcttcaatatscgagctaaat

SEQ ID NO: 37899 - DNA, 21 bp, Homo sapiens
gataaaggccrctgatcattg

SEQ ID NO: 37900 - DNA, 21 bp, Homo sapiens
caagccctatstgccgtattc

SEQ ID NO: 37901 - DNA, 21 bp, Homo sapiens
tttggtcagtrttgaaggcag

SEQ ID NO: 37902 - DNA, 21 bp, Homo sapiens
taaagaggtcrgtgggaagag

SEQ ID NO: 37903 - DNA, 21 bp, Homo sapiens
ctctgccacgmaacgaggtgg

SEQ ID NO: 37904 - DNA, 21 bp, Homo sapiens
acttccagttyagcagcggta

SEQ ID NO: 37905 - DNA, 21 bp, Homo sapiens
attgattctgytgctctcatc

SEQ ID NO: 37906 - DNA, 21 bp, Homo sapiens
caattgggtcrtagggtcaca

SEQ ID NO: 37907 - DNA, 21 bp, Homo sapiens
atgtaaacggygggaggagca

SEQ ID NO: 37908 - DNA, 21 bp, Homo sapiens
tgcattggtcrtactacacat

SEQ ID NO: 37909 - DNA, 21 bp, Homo sapiens
ttcactgaatytaccttgtac

SEQ ID NO: 37910 - DNA, 21 bp, Homo sapiens
ctgcggtgatkatttgaaaag

SEQ ID NO: 37911 - DNA, 21 bp, Homo sapiens
acttcgtaagrtaggagagta

SEQ ID NO: 37912 - DNA, 21 bp, Homo sapiens
ttcctgttacmgctagcataa

SEQ ID NO: 37913 - DNA, 21 bp, Homo sapiens
actgaaagtgktaagttttat

SEQ ID NO: 37914 - DNA, 21 bp, Homo sapiens
ttgagcactgrtccctaatag

SEQ ID NO: 37915 - DNA, 21 bp, Homo sapiens
cacattgtacytgtgctgctc

SEQ ID NO: 37916 - DNA, 21 bp, Homo sapiens
ttgtcttaaayaggaacattc

SEQ ID NO: 37917 - DNA, 21 bp, Homo sapiens
tttgactgcayagttctgtac

SEQ ID NO: 37918 - DNA, 21 bp, Homo sapiens
tgcaactgtgyttgaattacc

SEQ ID NO: 37919 - DNA, 21 bp, Homo sapiens
tcccaccatcrtattagaaaa

SEQ ID NO: 37920 - DNA, 21 bp, Homo sapiens
tcatctcatcrgcacctcagc

SEQ ID NO: 37921 - DNA, 21 bp, Homo sapiens
caggcctgggycaaacagggg

SEQ ID NO: 37922 - DNA, 21 bp, Homo sapiens
atgttggagcytctcggagcc

SEQ ID NO: 37923 - DNA, 21 bp, Homo sapiens
aatccctaagygctgtcaaat

SEQ ID NO: 37924 - DNA, 21 bp, Homo sapiens
cactcaccccyagtggtccta

SEQ ID NO: 37925 - DNA, 21 bp, Homo sapiens
ggttttttccrccctgtctca

SEQ ID NO: 37926 - DNA, 21 bp, Homo sapiens
actccatgccmggcactggcc

SEQ ID NO: 37927 - DNA, 21 bp, Homo sapiens
taagtgccttkggatctgaaa

SEQ ID NO: 37928 - DNA, 21 bp, Homo sapiens
caacagcctgrgaccttgtct

SEQ ID NO: 37929 - DNA, 21 bp, Homo sapiens
agtgctggaarttgatgacct

SEQ ID NO: 37930 - DNA, 21 bp, Homo sapiens
tgtctctctcygtgagtgcca

SEQ ID NO: 37931 - DNA, 21 bp, Homo sapiens
cagagaagctyggcggccagt

SEQ ID NO: 37932 - DNA, 21 bp, Homo sapiens
tagggactcartagacaatga

SEQ ID NO: 37933 - DNA, 21 bp, Homo sapiens
ttgaattacayagggttgatc

SEQ ID NO: 37934 - DNA, 21 bp, Homo sapiens
cttgggggaawaaagtttaga

SEQ ID NO: 37935 - DNA, 21 bp, Homo sapiens
gtcctaggccmtgaggataca

SEQ ID NO: 37936 - DNA, 21 bp, Homo sapiens
tgatttgtcayaaggataaaa

SEQ ID NO: 37937 - DNA, 21 bp, Homo sapiens
acgaaaatagmagcatctgtt

SEQ ID NO: 37938 - DNA, 21 bp, Homo sapiens
cccgccgcagytccatccaca

SEQ ID NO: 37939 - DNA, 21 bp, Homo sapiens
cagctccccaktcccaggctg

SEQ ID NO: 37940 - DNA, 21 bp, Homo sapiens
ttctgtggagraattgaagct

SEQ ID NO: 37941 - DNA, 21 bp, Homo sapiens
gggaggaggakggtgagggtc

SEQ ID NO: 37942 - DNA, 21 bp, Homo sapiens
taccaaaagamtgaaagctga

SEQ ID NO: 37943 - DNA, 21 bp, Homo sapiens
aacttgtgcarggctcagagg

SEQ ID NO: 37944 - DNA, 21 bp, Homo sapiens
tccaaatttcmaaagtacttg

SEQ ID NO: 37945 - DNA, 21 bp, Homo sapiens
accacagcagyactcctggat

SEQ ID NO: 37946 - DNA, 21 bp, Homo sapiens
tgtacattaamaaactaccac

SEQ ID NO: 37947 - DNA, 21 bp, Homo sapiens
tgggcaaccartaagaccacc

SEQ ID NO: 37948 - DNA, 21 bp, Homo sapiens
gttctttatcragactgtttt

SEQ ID NO: 37949 - DNA, 21 bp, Homo sapiens
tttataacttytttcaccata

SEQ ID NO: 37950 - DNA, 21 bp, Homo sapiens
atgattctatrtctttctgga

SEQ ID NO: 37951 - DNA, 21 bp, Homo sapiens
taaagtacagktccccaattt

SEQ ID NO: 37952 - DNA, 21 bp, Homo sapiens
ctttctctcaracatcttgca

SEQ ID NO: 37953 - DNA, 21 bp, Homo sapiens
ttggagagggsacttgtgcac

SEQ ID NO: 37954 - DNA, 21 bp, Homo sapiens
tgaaggacgcraaccttggga

SEQ ID NO: 37955 - DNA, 21 bp, Homo sapiens
ggccaaaatamtattgaaaat

SEQ ID NO: 37956 - DNA, 21 bp, Homo sapiens
gtcgttctcaratgtaggcag

SEQ ID NO: 37957 - DNA, 21 bp, Homo sapiens
ttggacagccrgagaattcca

SEQ ID NO: 37958 - DNA, 21 bp, Homo sapiens
aggaggaagayagtggctcca

SEQ ID NO: 37959 - DNA, 21 bp, Homo sapiens
tgaagctaatytttttgtcca

SEQ ID NO: 37960 - DNA, 21 bp, Homo sapiens
gaacatccttrtgcccctgtg

SEQ ID NO: 37961 - DNA, 21 bp, Homo sapiens
gctgtcagagygggcaccgca

SEQ ID NO: 37962 - DNA, 21 bp, Homo sapiens
ataaactcatytccacgtcag

SEQ ID NO: 37963 - DNA, 21 bp, Homo sapiens
actgaaaaagrtaagtgtcac

SEQ ID NO: 37964 - DNA, 21 bp, Homo sapiens
ttggctgagaytgagaaatgt

SEQ ID NO: 37965 - DNA, 21 bp, Homo sapiens
agtatttgtawgtgactccac

SEQ ID NO: 37966 - DNA, 21 bp, Homo sapiens
taacatgtccytgacacttga

SEQ ID NO: 37967 - DNA, 21 bp, Homo sapiens
acagtgactgkgtattgctta

SEQ ID NO: 37968 - DNA, 21 bp, Homo sapiens
aattgctttcyaaatccaacg

SEQ ID NO: 37969 - DNA, 21 bp, Homo sapiens
cacaatagaaraaaacatcag

SEQ ID NO: 37970 - DNA, 21 bp, Homo sapiens
agaggaaatckgtgcaaatcc

SEQ ID NO: 37971 - DNA, 21 bp, Homo sapiens
gttgatctgtytgtatactcc

SEQ ID NO: 37972 - DNA, 21 bp, Homo sapiens
tttcaataaawataggaagca

SEQ ID NO: 37973 - DNA, 21 bp, Homo sapiens
agtcaacttgrttacacacag

SEQ ID NO: 37974 - DNA, 21 bp, Homo sapiens
tttcaggtagygacagagcag

SEQ ID NO: 37975 - DNA, 21 bp, Homo sapiens
agattatttartgaaaccaat

SEQ ID NO: 37976 - DNA, 21 bp, Homo sapiens
tggagtcattsaatcacccaa

SEQ ID NO: 37977 - DNA, 21 bp, Homo sapiens
tctgaaatgaygaggtttgat

SEQ ID NO: 37978 - DNA, 21 bp, Homo sapiens
atagaaagtgygttaggtggt

SEQ ID NO: 37979 - DNA, 21 bp, Homo sapiens
tcaggtattawggaacaagta

SEQ ID NO: 37980 - DNA, 21 bp, Homo sapiens
gtcaaaatcayctatgaggtt

SEQ ID NO: 37981 - DNA, 21 bp, Homo sapiens
tgggatggcayacaaagcact

SEQ ID NO: 37982 - DNA, 21 bp, Homo sapiens
tagcttggtaygtgataagca

SEQ ID NO: 37983 - DNA, 21 bp, Homo sapiens
ctctacacatytctaccaaat

SEQ ID NO: 37984 - DNA, 21 bp, Homo sapiens
tactcattaaygtacctttta

SEQ ID NO: 37985 - DNA, 21 bp, Homo sapiens
ggcctgatttmtctcctggag

SEQ ID NO: 37986 - DNA, 21 bp, Homo sapiens
taaacatttcrgaaagaggat

SEQ ID NO: 37987 - DNA, 21 bp, Homo sapiens
tgtatttttcrttttctcaag

SEQ ID NO: 37988 - DNA, 21 bp, Homo sapiens
gtgaatgccarataagtgcaa

SEQ ID NO: 37989 - DNA, 21 bp, Homo sapiens
aagaatccatkatgtacttga

SEQ ID NO: 37990 - DNA, 21 bp, Homo sapiens
aagcgactttwaaatcttggt

SEQ ID NO: 37991 - DNA, 21 bp, Homo sapiens
ttcgagaacarctgatactta

SEQ ID NO: 37992 - DNA, 21 bp, Homo sapiens
aattgaatccrtaaagctttg

SEQ ID NO: 37993 - DNA, 21 bp, Homo sapiens
ggggatttttmgttcctaaac

SEQ ID NO: 37994 - DNA, 21 bp, Homo sapiens
gtatacactckgaaatgcatg

SEQ ID NO: 37995 - DNA, 21 bp, Homo sapiens
tgacctgaaaraaaaataagt

SEQ ID NO: 37996 - DNA, 21 bp, Homo sapiens
atgccaaccamataaagaaac

SEQ ID NO: 37997 - DNA, 21 bp, Homo sapiens
acggtatttgragcaagtata

SEQ ID NO: 37998 - DNA, 21 bp, Homo sapiens
atgtttccacrtgtatcctac

SEQ ID NO: 37999 - DNA, 21 bp, Homo sapiens
gaatcagatgyttgccagaca

SEQ ID NO: 38000 - DNA, 21 bp, Homo sapiens
ttatgtgctgyagaaaaagta

SEQ ID NO: 38001 - DNA, 21 bp, Homo sapiens
gatttcctcaytgtctattgg

SEQ ID NO: 38002 - DNA, 21 bp, Homo sapiens
agttcacctayactttgacaa

SEQ ID NO: 38003 - DNA, 21 bp, Homo sapiens
caagtaagcgrccgcgagtaa

SEQ ID NO: 38004 - DNA, 21 bp, Homo sapiens
ttggtgagctmttaccagaag

SEQ ID NO: 38005 - DNA, 21 bp, Homo sapiens
tttatgaaaaytttttgtagg

SEQ ID NO: 38006 - DNA, 21 bp, Homo sapiens
tttgcatttargactatggcc

SEQ ID NO: 38007 - DNA, 21 bp, Homo sapiens
atataaagctratagccacct

SEQ ID NO: 38008 - DNA, 21 bp, Homo sapiens
acattctcgtytggaaggact

SEQ ID NO: 38009 - DNA, 21 bp, Homo sapiens
gatgcctaacytgtcagacat

SEQ ID NO: 38010 - DNA, 21 bp, Homo sapiens
caggtgagaawttcagaggat

SEQ ID NO: 38011 - DNA, 21 bp, Homo sapiens
ttgaaaggttrccggatttgt

SEQ ID NO: 38012 - DNA, 21 bp, Homo sapiens
gataattagayttttctgcag

SEQ ID NO: 38013 - DNA, 21 bp, Homo sapiens
aatagtttacrctagaaagta

SEQ ID NO: 38014 - DNA, 21 bp, Homo sapiens
ctcccaccacrcattgtcagg

SEQ ID NO: 38015 - DNA, 21 bp, Homo sapiens
taaagagatcrgaaaagttct

SEQ ID NO: 38016 - DNA, 21 bp, Homo sapiens
tatttgcagawccagaaatct

SEQ ID NO: 38017 - DNA, 21 bp, Homo sapiens
agcatgccccyttctctcata

SEQ ID NO: 38018 - DNA, 21 bp, Homo sapiens
taagcagtgasattagttaaa

SEQ ID NO: 38019 - DNA, 21 bp, Homo sapiens
ttgactttccytatgcatgta

SEQ ID NO: 38020 - DNA, 21 bp, Homo sapiens
agaccaacccractttacccc

SEQ ID NO: 38021 - DNA, 21 bp, Homo sapiens
aaatacttccycatcatttgc

SEQ ID NO: 38022 - DNA, 21 bp, Homo sapiens
gttgcttgagrctgtgtgtta

SEQ ID NO: 38023 - DNA, 21 bp, Homo sapiens
ctaggtcacarcaaggacagg

SEQ ID NO: 38024 - DNA, 21 bp, Homo sapiens
agtgttcggcrtcagactccg

SEQ ID NO: 38025 - DNA, 21 bp, Homo sapiens
ggagaattagrttgaaaaatt

SEQ ID NO: 38026 - DNA, 21 bp, Homo sapiens
cttggacagartagatgcact

SEQ ID NO: 38027 - DNA, 21 bp, Homo sapiens
gttatttacayttctatctgt

SEQ ID NO: 38028 - DNA, 21 bp, Homo sapiens
cgccctggackcggttctact

SEQ ID NO: 38029 - DNA, 21 bp, Homo sapiens
taggatatgcyattagttagt

SEQ ID NO: 38030 - DNA, 21 bp, Homo sapiens
ggattaattgraatggacctt

SEQ ID NO: 38031 - DNA, 21 bp, Homo sapiens
acgtaaacttwattaagacaa

SEQ ID NO: 38032 - DNA, 21 bp, Homo sapiens
taatacaagtscaaatatcct

SEQ ID NO: 38033 - DNA, 21 bp, Homo sapiens
tgattttaaastaacagcaga

SEQ ID NO: 38034 - DNA, 21 bp, Homo sapiens
ttttgctactycttttctgcc

SEQ ID NO: 38035 - DNA, 21 bp, Homo sapiens
ttcaaatcctrtgaaactaca

SEQ ID NO: 38036 - DNA, 21 bp, Homo sapiens
ttcatgagacrggaaaaatta

SEQ ID NO: 38037 - DNA, 21 bp, Homo sapiens
gagctgactcrttacattagc

SEQ ID NO: 38038 - DNA, 21 bp, Homo sapiens
taaccccagawgtatcatttc

SEQ ID NO: 38039 - DNA, 21 bp, Homo sapiens
ggactctatcwtcttgaataa

SEQ ID NO: 38040 - DNA, 21 bp, Homo sapiens
tctacattgcrgaacagaatt

SEQ ID NO: 38041 - DNA, 21 bp, Homo sapiens
tccacacttaygttgactcag

SEQ ID NO: 38042 - DNA, 21 bp, Homo sapiens
tcattccttcygctgagagtc

SEQ ID NO: 38043 - DNA, 21 bp, Homo sapiens
cattgttttcragattctcca

SEQ ID NO: 38044 - DNA, 21 bp, Homo sapiens
gcctgtactaygagcacgcac

SEQ ID NO: 38045 - DNA, 21 bp, Homo sapiens
tatgctgagarggatttattt

SEQ ID NO: 38046 - DNA, 21 bp, Homo sapiens
ctcagcaaacrttaattgggc

SEQ ID NO: 38047 - DNA, 21 bp, Homo sapiens
ctggctgagcygcaccgcgca

SEQ ID NO: 38048 - DNA, 21 bp, Homo sapiens
caagggaggtyggtgaagatc

SEQ ID NO: 38049 - DNA, 21 bp, Homo sapiens
tttcagatctrtacagttctt

SEQ ID NO: 38050 - DNA, 21 bp, Homo sapiens
tgacattatcraacacttaca

SEQ ID NO: 38051 - DNA, 21 bp, Homo sapiens
ttcaggaagcrtggaaagaac

SEQ ID NO: 38052 - DNA, 21 bp, Homo sapiens
ctaacattgtragcatgaaag

SEQ ID NO: 38053 - DNA, 21 bp, Homo sapiens
atattttgccrttgtcttact

SEQ ID NO: 38054 - DNA, 21 bp, Homo sapiens
gaaatgtagcyagaacatatt

SEQ ID NO: 38055 - DNA, 21 bp, Homo sapiens
ttcttgggatmgttcattctg

SEQ ID NO: 38056 - DNA, 21 bp, Homo sapiens
cagaatgtagrtacatatagg

SEQ ID NO: 38057 - DNA, 21 bp, Homo sapiens
acattgaaaasaccattttaa

SEQ ID NO: 38058 - DNA, 21 bp, Homo sapiens
gtctcagcacrggatttaaat

SEQ ID NO: 38059 - DNA, 21 bp, Homo sapiens
taggctattaytattaactgt

SEQ ID NO: 38060 - DNA, 21 bp, Homo sapiens
tcagaaccttsgctttttggg

SEQ ID NO: 38061 - DNA, 21 bp, Homo sapiens
gtaccaagtaygcaataggaa

SEQ ID NO: 38062 - DNA, 21 bp, Homo sapiens
acaaactcttrtaaaccgtga

SEQ ID NO: 38063 - DNA, 21 bp, Homo sapiens
gctaatttgtkatgcagcaat

SEQ ID NO: 38064 - DNA, 21 bp, Homo sapiens
gttgactttgmcactttctct

SEQ ID NO: 38065 - DNA, 21 bp, Homo sapiens
aggctgagaartatagttggg

SEQ ID NO: 38066 - DNA, 21 bp, Homo sapiens
ttagaaattaraagattgaga

SEQ ID NO: 38067 - DNA, 21 bp, Homo sapiens
tgacaccaacytctcctttac

SEQ ID NO: 38068 - DNA, 21 bp, Homo sapiens
caatttatttrgtggccattg

SEQ ID NO: 38069 - DNA, 21 bp, Homo sapiens
ggctgtgcaarcatagagctc

SEQ ID NO: 38070 - DNA, 21 bp, Homo sapiens
tcccaggtgamaaatcatgat

SEQ ID NO: 38071 - DNA, 21 bp, Homo sapiens
gtgaaagctgytgtgtactga

SEQ ID NO: 38072 - DNA, 21 bp, Homo sapiens
ccctactcctrtctctgtttt

SEQ ID NO: 38073 - DNA, 21 bp, Homo sapiens
ggcctaacttytgtgacaaac

SEQ ID NO: 38074 - DNA, 21 bp, Homo sapiens
atcatcaggayttaccattaa

SEQ ID NO: 38075 - DNA, 21 bp, Homo sapiens
aattcacttgygcttctttag

SEQ ID NO: 38076 - DNA, 21 bp, Homo sapiens
ctcacttatayttaactgctg

SEQ ID NO: 38077 - DNA, 21 bp, Homo sapiens
ctacaaatcayctggagacct

SEQ ID NO: 38078 - DNA, 21 bp, Homo sapiens
cttgaatgctwtcagggaagc

SEQ ID NO: 38079 - DNA, 21 bp, Homo sapiens
acagctttgcmtctgggttag

SEQ ID NO: 38080 - DNA, 21 bp, Homo sapiens
tatcataggcyttaattcttg

SEQ ID NO: 38081 - DNA, 21 bp, Homo sapiens
gtgtaccccamattttaccct

SEQ ID NO: 38082 - DNA, 21 bp, Homo sapiens
aagagaagacstgactcagtt

SEQ ID NO: 38083 - DNA, 21 bp, Homo sapiens
gatgcacttcrataagtacct

SEQ ID NO: 38084 - DNA, 21 bp, Homo sapiens
acatggtgttmatgagaatcc

SEQ ID NO: 38085 - DNA, 21 bp, Homo sapiens
agtagaggtasggtaggaagc

SEQ ID NO: 38086 - DNA, 21 bp, Homo sapiens
acagttttcarctattcccag

SEQ ID NO: 38087 - DNA, 21 bp, Homo sapiens
caactataatrtgaatttggg

SEQ ID NO: 38088 - DNA, 21 bp, Homo sapiens
gtttacagtaygttctgaact

SEQ ID NO: 38089 - DNA, 21 bp, Homo sapiens
acaatactgamctgagagatc

SEQ ID NO: 38090 - DNA, 21 bp, Homo sapiens
aggtaatattmccatttttac

SEQ ID NO: 38091 - DNA, 21 bp, Homo sapiens
cacaagtgtastattttgaag

SEQ ID NO: 38092 - DNA, 21 bp, Homo sapiens
aactgctaccrtaatgcagat

SEQ ID NO: 38093 - DNA, 21 bp, Homo sapiens
tcaccatgtgsctacccttta

SEQ ID NO: 38094 - DNA, 21 bp, Homo sapiens
ttcatgttgcytctgtaaata

SEQ ID NO: 38095 - DNA, 21 bp, Homo sapiens
cacaccatctstttcttattc

SEQ ID NO: 38096 - DNA, 21 bp, Homo sapiens
agtctttaacygtaatgtcaa

SEQ ID NO: 38097 - DNA, 21 bp, Homo sapiens
tattggcgatrtaaacttgac

SEQ ID NO: 38098 - DNA, 21 bp, Homo sapiens
gctttatttayttccatacat

SEQ ID NO: 38099 - DNA, 21 bp, Homo sapiens
cagcagagagygagaggaggg

SEQ ID NO: 38100 - DNA, 21 bp, Homo sapiens
aatataagatygggtggtgaa

SEQ ID NO: 38101 - DNA, 21 bp, Homo sapiens
acattgcaggsggttccaaag

SEQ ID NO: 38102 - DNA, 21 bp, Homo sapiens
agtaaacgctrtggacaggca

SEQ ID NO: 38103 - DNA, 21 bp, Homo sapiens
tctgcagccartgactgaaca

SEQ ID NO: 38104 - DNA, 21 bp, Homo sapiens
tgaaggccacrtctgcctgag

SEQ ID NO: 38105 - DNA, 21 bp, Homo sapiens
tcataagcccraatattgtct

SEQ ID NO: 38106 - DNA, 21 bp, Homo sapiens
tgaggctacaytagtgatttg

SEQ ID NO: 38107 - DNA, 21 bp, Homo sapiens
ctcctagcagkgtttgtgcag

SEQ ID NO: 38108 - DNA, 21 bp, Homo sapiens
ttttctcttgrctatttactg

SEQ ID NO: 38109 - DNA, 21 bp, Homo sapiens
ttccttcctayagaactcctg

SEQ ID NO: 38110 - DNA, 21 bp, Homo sapiens
ataaatgttayttctgcctta

SEQ ID NO: 38111 - DNA, 21 bp, Homo sapiens
gtagaatcctrtatttacttc

SEQ ID NO: 38112 - DNA, 21 bp, Homo sapiens
ctctaagtggraaaatgactc

SEQ ID NO: 38113 - DNA, 21 bp, Homo sapiens
cctgtttcagmcagccattgt

SEQ ID NO: 38114 - DNA, 21 bp, Homo sapiens
tagtgaagagrggtctaaagt

SEQ ID NO: 38115 - DNA, 21 bp, Homo sapiens
tcacctgtgtyacccttacct

SEQ ID NO: 38116 - DNA, 21 bp, Homo sapiens
tttctgttccyctcctgcccc

SEQ ID NO: 38117 - DNA, 21 bp, Homo sapiens
ttaaatgaagrggctcatatt

SEQ ID NO: 38118 - DNA, 21 bp, Homo sapiens
tgttgagtctrgccatgcgtc

SEQ ID NO: 38119 - DNA, 21 bp, Homo sapiens
ttagtttttcrtattccaaaa

SEQ ID NO: 38120 - DNA, 21 bp, Homo sapiens
gaaaaccctgrattttgggca

SEQ ID NO: 38121 - DNA, 21 bp, Homo sapiens
gaagaggaagytctttatgta

SEQ ID NO: 38122 - DNA, 21 bp, Homo sapiens
tccaacatcaytgcagttaac

SEQ ID NO: 38123 - DNA, 21 bp, Homo sapiens
actacaactaraatagttttg

SEQ ID NO: 38124 - DNA, 21 bp, Homo sapiens
ttccagacttytttctatact

SEQ ID NO: 38125 - DNA, 21 bp, Homo sapiens
aggaaagggaycaaatgtttt

SEQ ID NO: 38126 - DNA, 21 bp, Homo sapiens
acgcatgatcrcctcctacca

SEQ ID NO: 38127 - DNA, 21 bp, Homo sapiens
ctcttataaayatctagtctg

SEQ ID NO: 38128 - DNA, 21 bp, Homo sapiens
ttctctcagcsagtgtgataa

SEQ ID NO: 38129 - DNA, 21 bp, Homo sapiens
ttttggaatcraacagatcag

SEQ ID NO: 38130 - DNA, 21 bp, Homo sapiens
cctgtaggagratagcagaac

SEQ ID NO: 38131 - DNA, 21 bp, Homo sapiens
tctagccactrgacattgaac

SEQ ID NO: 38132 - DNA, 21 bp, Homo sapiens
tgatttcaaarttacatatgg

SEQ ID NO: 38133 - DNA, 21 bp, Homo sapiens
catagtctgtwttcttcttgc

SEQ ID NO: 38134 - DNA, 21 bp, Homo sapiens
tttaactaggmaattttagtt

SEQ ID NO: 38135 - DNA, 21 bp, Homo sapiens
catctttgtaygaagctgtat

SEQ ID NO: 38136 - DNA, 21 bp, Homo sapiens
tacttacagamttgttatagc

SEQ ID NO: 38137 - DNA, 21 bp, Homo sapiens
ctctccagtcytttaactcta

SEQ ID NO: 38138 - DNA, 21 bp, Homo sapiens
taagatatgtkaatagccctc

SEQ ID NO: 38139 - DNA, 21 bp, Homo sapiens
tgcaactcatmtttgtaaatc

SEQ ID NO: 38140 - DNA, 21 bp, Homo sapiens
ttggaaaaacytgaatcttca

SEQ ID NO: 38141 - DNA, 21 bp, Homo sapiens
gtgtcactccrtaattgttct

SEQ ID NO: 38142 - DNA, 21 bp, Homo sapiens
gaggtcatttygtaagtcaag

SEQ ID NO: 38143 - DNA, 21 bp, Homo sapiens
gcagtgtggcrggttgcctgc

SEQ ID NO: 38144 - DNA, 21 bp, Homo sapiens
caaaagtagargttgacgaat

SEQ ID NO: 38145 - DNA, 21 bp, Homo sapiens
tccaagttackgttcttgtta

SEQ ID NO: 38146 - DNA, 21 bp, Homo sapiens
accaggtcatrgaaggcataa

SEQ ID NO: 38147 - DNA, 21 bp, Homo sapiens
tagaaataaaygtctcctacc

SEQ ID NO: 38148 - DNA, 21 bp, Homo sapiens
aaccttgtagrcccaggaaaa

SEQ ID NO: 38149 - DNA, 21 bp, Homo sapiens
ccactaggaasctcagggcca

SEQ ID NO: 38150 - DNA, 21 bp, Homo sapiens
gaaacaagacratttggataa

SEQ ID NO: 38151 - DNA, 21 bp, Homo sapiens
ccgcccctcaygctgcagtgc

SEQ ID NO: 38152 - DNA, 21 bp, Homo sapiens
tggggacaatragtgattctc

SEQ ID NO: 38153 - DNA, 21 bp, Homo sapiens
tggagtcagtrcacgtgaatt

SEQ ID NO: 38154 - DNA, 21 bp, Homo sapiens
cagatgaccayggcctggagc

SEQ ID NO: 38155 - DNA, 21 bp, Homo sapiens
tggcatgcgasgaatgctcca

SEQ ID NO: 38156 - DNA, 21 bp, Homo sapiens
gcagctgtccrggtggaattc

SEQ ID NO: 38157 - DNA, 21 bp, Homo sapiens
ttattggagcygactctgcct

SEQ ID NO: 38158 - DNA, 21 bp, Homo sapiens
aagttctgcartcatctctgc

SEQ ID NO: 38159 - DNA, 21 bp, Homo sapiens
ctgttttcccrtagaagccag

SEQ ID NO: 38160 - DNA, 21 bp, Homo sapiens
ccgtaattgaytggagtccct

SEQ ID NO: 38161 - DNA, 21 bp, Homo sapiens
cttcttaaaasaggtgtttca

SEQ ID NO: 38162 - DNA, 21 bp, Homo sapiens
ccataaatctrggtaacattc

SEQ ID NO: 38163 - DNA, 21 bp, Homo sapiens
gcttcccttarcacacaattg

SEQ ID NO: 38164 - DNA, 21 bp, Homo sapiens
tagcttttcarttgatcttcc

SEQ ID NO: 38165 - DNA, 21 bp, Homo sapiens
agagattacasagaagatgag

SEQ ID NO: 38166 - DNA, 21 bp, Homo sapiens
taaaaattgaraatggcctct

SEQ ID NO: 38167 - DNA, 21 bp, Homo sapiens
cattcaatagsgatttgatga

SEQ ID NO: 38168 - DNA, 21 bp, Homo sapiens
agctcatctakataccaatca

SEQ ID NO: 38169 - DNA, 21 bp, Homo sapiens
ccgaatcactrggaaaattca

SEQ ID NO: 38170 - DNA, 21 bp, Homo sapiens
tatgtttaagrccaaaaaagt

SEQ ID NO: 38171 - DNA, 21 bp, Homo sapiens
tgcatccaaawacagaactgc

SEQ ID NO: 38172 - DNA, 21 bp, Homo sapiens
taggctgttcracaaaatttt

SEQ ID NO: 38173 - DNA, 21 bp, Homo sapiens
aaagtcttctrtattcaggtg

SEQ ID NO: 38174 - DNA, 21 bp, Homo sapiens
tggatacttaygcagatcact

SEQ ID NO: 38175 - DNA, 21 bp, Homo sapiens
tttctgaaaamgtggctaaag

SEQ ID NO: 38176 - DNA, 21 bp, Homo sapiens
attcagtcccraggcttaaat

SEQ ID NO: 38177 - DNA, 21 bp, Homo sapiens
tgtggaaaatsaaaggcacca

SEQ ID NO: 38178 - DNA, 21 bp, Homo sapiens
ctcttctgtgmtaacagaaga

SEQ ID NO: 38179 - DNA, 21 bp, Homo sapiens
tactttctgayattctcttct

SEQ ID NO: 38180 - DNA, 21 bp, Homo sapiens
tcccatccagrttcacactct

SEQ ID NO: 38181 - DNA, 21 bp, Homo sapiens
actttccacaygctgactgga

SEQ ID NO: 38182 - DNA, 21 bp, Homo sapiens
atctaacatcyccatgctaca

SEQ ID NO: 38183 - DNA, 21 bp, Homo sapiens
ctgagtacggragagcctctg

SEQ ID NO: 38184 - DNA, 21 bp, Homo sapiens
caaaagtgtayagcagaaagt

SEQ ID NO: 38185 - DNA, 21 bp, Homo sapiens
atatggcaatrgcttcaaaat

SEQ ID NO: 38186 - DNA, 21 bp, Homo sapiens
caggaggaatkttttcattat

SEQ ID NO: 38187 - DNA, 21 bp, Homo sapiens
ggctattgagraaatggacag

SEQ ID NO: 38188 - DNA, 21 bp, Homo sapiens
tttgttcacgygttctttcat

SEQ ID NO: 38189 - DNA, 21 bp, Homo sapiens
catcttgtcaracatatttac

SEQ ID NO: 38190 - DNA, 21 bp, Homo sapiens
accaatgaccygactgtgtct

SEQ ID NO: 38191 - DNA, 21 bp, Homo sapiens
gtgtcataagrtggcatgaga

SEQ ID NO: 38192 - DNA, 21 bp, Homo sapiens
atcagagcccrtatcagacca

SEQ ID NO: 38193 - DNA, 21 bp, Homo sapiens
tgacaaaagtrcagatgacat

SEQ ID NO: 38194 - DNA, 21 bp, Homo sapiens
acatggagaarctggagagaa

SEQ ID NO: 38195 - DNA, 21 bp, Homo sapiens
ttgtcttgccyaacaatgaat

SEQ ID NO: 38196 - DNA, 21 bp, Homo sapiens
tcaagactacygcaaagacta

SEQ ID NO: 38197 - DNA, 21 bp, Homo sapiens
gatcttgtggrcctctgtcag

SEQ ID NO: 38198 - DNA, 21 bp, Homo sapiens
ctgactttgcrtaatataaat

SEQ ID NO: 38199 - DNA, 21 bp, Homo sapiens
tacatacttayggggtggaag

SEQ ID NO: 38200 - DNA, 21 bp, Homo sapiens
gaggagaatasctccaaggac

SEQ ID NO: 38201 - DNA, 21 bp, Homo sapiens
ggttctgtctrcaaattattt

SEQ ID NO: 38202 - DNA, 21 bp, Homo sapiens
tgtgtaaggaratcaagctgt

SEQ ID NO: 38203 - DNA, 21 bp, Homo sapiens
caaggtctccstaattttgtc

SEQ ID NO: 38204 - DNA, 21 bp, Homo sapiens
tacagattctyaataattact

SEQ ID NO: 38205 - DNA, 21 bp, Homo sapiens
accccatcctrtttcttcaca

SEQ ID NO: 38206 - DNA, 21 bp, Homo sapiens
atggccagctstcttctcatc

SEQ ID NO: 38207 - DNA, 21 bp, Homo sapiens
aagaaaatgayttggtagttg

SEQ ID NO: 38208 - DNA, 21 bp, Homo sapiens
atcatgatccsaaaaggtaag

SEQ ID NO: 38209 - DNA, 21 bp, Homo sapiens
tcactatgtcygctaattaca

SEQ ID NO: 38210 - DNA, 21 bp, Homo sapiens
ctctcaaactrtaacagaagg

SEQ ID NO: 38211 - DNA, 21 bp, Homo sapiens
agaggtgtgcsgtgtataacc

SEQ ID NO: 38212 - DNA, 21 bp, Homo sapiens
atcaagcaagrctgaaatcta

SEQ ID NO: 38213 - DNA, 21 bp, Homo sapiens
tggctactggmagaagtgcat

SEQ ID NO: 38214 - DNA, 21 bp, Homo sapiens
accacccaggraagtcaccat

SEQ ID NO: 38215 - DNA, 21 bp, Homo sapiens
tgttagagatmaaatattact

SEQ ID NO: 38216 - DNA, 21 bp, Homo sapiens
gcaaccactamagaatttctc

SEQ ID NO: 38217 - DNA, 21 bp, Homo sapiens
gggaaggtagyatatgcatac

SEQ ID NO: 38218 - DNA, 21 bp, Homo sapiens
tatccatcccragggctagaa

SEQ ID NO: 38219 - DNA, 21 bp, Homo sapiens
tagtgccttcmaccaaggata

SEQ ID NO: 38220 - DNA, 21 bp, Homo sapiens
catgcaggtgrttcttctgtc

SEQ ID NO: 38221 - DNA, 21 bp, Homo sapiens
gacaatcaatrtcactagttt

SEQ ID NO: 38222 - DNA, 21 bp, Homo sapiens
ctcatcattaygttaatacct

SEQ ID NO: 38223 - DNA, 21 bp, Homo sapiens
cttacttcacwgactgattca

SEQ ID NO: 38224 - DNA, 21 bp, Homo sapiens
agtcatgcagyttatattcta

SEQ ID NO: 38225 - DNA, 21 bp, Homo sapiens
ggaggggtgayggttctatat

SEQ ID NO: 38226 - DNA, 21 bp, Homo sapiens
ggaaaaaaaaragaattctcc

SEQ ID NO: 38227 - DNA, 21 bp, Homo sapiens
accatctcacracttattagc

SEQ ID NO: 38228 - DNA, 21 bp, Homo sapiens
tatgctgagtsaaaaacaggc

SEQ ID NO: 38229 - DNA, 21 bp, Homo sapiens
agttatttgtstcttcatatt

SEQ ID NO: 38230 - DNA, 21 bp, Homo sapiens
ccagccttcarcattctttta

SEQ ID NO: 38231 - DNA, 21 bp, Homo sapiens
atatgtgaacytgagattttt

SEQ ID NO: 38232 - DNA, 21 bp, Homo sapiens
ttccaaaaacsctgtctgtag

SEQ ID NO: 38233 - DNA, 21 bp, Homo sapiens
caaattggagrccaggattct

SEQ ID NO: 38234 - DNA, 21 bp, Homo sapiens
tgttcaaagaygcaccaaaat

SEQ ID NO: 38235 - DNA, 21 bp, Homo sapiens
gtacatggggyagggggactt

SEQ ID NO: 38236 - DNA, 21 bp, Homo sapiens
cctctctgggkctgtccatgg

SEQ ID NO: 38237 - DNA, 21 bp, Homo sapiens
ggatggcctgkagggcttttt

SEQ ID NO: 38238 - DNA, 21 bp, Homo sapiens
atgaaaacagktggattaatg

SEQ ID NO: 38239 - DNA, 21 bp, Homo sapiens
atcaagaaatraatcctacca

SEQ ID NO: 38240 - DNA, 21 bp, Homo sapiens
tctgagacttsagttaagtca

SEQ ID NO: 38241 - DNA, 21 bp, Homo sapiens
tacacatgttwatcacctagt

SEQ ID NO: 38242 - DNA, 21 bp, Homo sapiens
atgccttttamgctttttact

SEQ ID NO: 38243 - DNA, 21 bp, Homo sapiens
tgttctttccrttgggcttaa

SEQ ID NO: 38244 - DNA, 21 bp, Homo sapiens
atggacaatayattttttgca

SEQ ID NO: 38245 - DNA, 21 bp, Homo sapiens
agttttaacayactatccact

SEQ ID NO: 38246 - DNA, 21 bp, Homo sapiens
agaggaatgasagctgatgca

SEQ ID NO: 38247 - DNA, 21 bp, Homo sapiens
ttatcttgtayttttgtttaa

SEQ ID NO: 38248 - DNA, 21 bp, Homo sapiens
ttttcgtaagyagacagactc

SEQ ID NO: 38249 - DNA, 21 bp, Homo sapiens
acgggtatctrtacacaaata

SEQ ID NO: 38250 - DNA, 21 bp, Homo sapiens
ggtttaaacamattttcccta

SEQ ID NO: 38251 - DNA, 21 bp, Homo sapiens
actgaacattmaaatgaggcc

SEQ ID NO: 38252 - DNA, 21 bp, Homo sapiens
tgacaactacmtaaagactgt

SEQ ID NO: 38253 - DNA, 21 bp, Homo sapiens
aaggcacaatyctaaagccta

SEQ ID NO: 38254 - DNA, 21 bp, Homo sapiens
tatttattccwgacaaattaa

SEQ ID NO: 38255 - DNA, 21 bp, Homo sapiens
gatgccctacrctgccctgtc

SEQ ID NO: 38256 - DNA, 21 bp, Homo sapiens
cattggccttrctgcttggga

SEQ ID NO: 38257 - DNA, 21 bp, Homo sapiens
ttattaacccmttttcacatg

SEQ ID NO: 38258 - DNA, 21 bp, Homo sapiens
ttctctgtaamtctctatacg

SEQ ID NO: 38259 - DNA, 21 bp, Homo sapiens
tcctgcgcatygaagactgac

SEQ ID NO: 38260 - DNA, 21 bp, Homo sapiens
gtacaagttcyctattacgca

SEQ ID NO: 38261 - DNA, 21 bp, Homo sapiens
tagaaatttcytaaagttgat

SEQ ID NO: 38262 - DNA, 21 bp, Homo sapiens
aaacatcagargcagctagaa

SEQ ID NO: 38263 - DNA, 21 bp, Homo sapiens
aaattgaggtragaattagga

SEQ ID NO: 38264 - DNA, 21 bp, Homo sapiens
tacatatccartcctgtcaga

SEQ ID NO: 38265 - DNA, 21 bp, Homo sapiens
tagaactttaygcagaagtac

SEQ ID NO: 38266 - DNA, 21 bp, Homo sapiens
aggatgtcaayttgtaatcag

SEQ ID NO: 38267 - DNA, 21 bp, Homo sapiens
acctatgttayctttgcagag

SEQ ID NO: 38268 - DNA, 21 bp, Homo sapiens
gtaagttagascttgacagta

SEQ ID NO: 38269 - DNA, 21 bp, Homo sapiens
ttactctgtcytgggtctctt

SEQ ID NO: 38270 - DNA, 21 bp, Homo sapiens
tggaacaatcwttccttctat

SEQ ID NO: 38271 - DNA, 21 bp, Homo sapiens
gtgatttttayaatctagtct

SEQ ID NO: 38272 - DNA, 21 bp, Homo sapiens
tgtctttttayaaacaagata

SEQ ID NO: 38273 - DNA, 21 bp, Homo sapiens
acccatcttasagggctgtgt

SEQ ID NO: 38274 - DNA, 21 bp, Homo sapiens
ataactaaacyctgctgaatc

SEQ ID NO: 38275 - DNA, 21 bp, Homo sapiens
ataaaagaggrgtctatttat

SEQ ID NO: 38276 - DNA, 21 bp, Homo sapiens
atcagatgtcmgcataagcga

SEQ ID NO: 38277 - DNA, 21 bp, Homo sapiens
ttatttcaagyaatatttgct

SEQ ID NO: 38278 - DNA, 21 bp, Homo sapiens
tatatctctaycagtggtgca

SEQ ID NO: 38279 - DNA, 21 bp, Homo sapiens
gagattgtttycttaagggct

SEQ ID NO: 38280 - DNA, 21 bp, Homo sapiens
tgtaatttaargtcttctggc

SEQ ID NO: 38281 - DNA, 21 bp, Homo sapiens
acccggggctrgttgcttttg

SEQ ID NO: 38282 - DNA, 21 bp, Homo sapiens
ttactagaaayaacatggtca

SEQ ID NO: 38283 - DNA, 21 bp, Homo sapiens
cagattaccartgttgagatt

SEQ ID NO: 38284 - DNA, 21 bp, Homo sapiens
agatgttcttyacgtactctg

SEQ ID NO: 38285 - DNA, 21 bp, Homo sapiens
tccaattaacygctattgtga

SEQ ID NO: 38286 - DNA, 21 bp, Homo sapiens
catcttgcatrcctatttccc

SEQ ID NO: 38287 - DNA, 21 bp, Homo sapiens
gtttagtatgstcctatgtga

SEQ ID NO: 38288 - DNA, 21 bp, Homo sapiens
cacagaactgsagacctgagc

SEQ ID NO: 38289 - DNA, 21 bp, Homo sapiens
aggtcaattamaattactaag

SEQ ID NO: 38290 - DNA, 21 bp, Homo sapiens
aaaatgttggsttaaaagaca

SEQ ID NO: 38291 - DNA, 21 bp, Homo sapiens
ttcagtccttrtccacatttt

SEQ ID NO: 38292 - DNA, 21 bp, Homo sapiens
gttctgaaagragcattgaac

SEQ ID NO: 38293 - DNA, 21 bp, Homo sapiens
atactacagaygtcggtttct

SEQ ID NO: 38294 - DNA, 21 bp, Homo sapiens
ttttcattctygtaggacatg

SEQ ID NO: 38295 - DNA, 21 bp, Homo sapiens
ctctggcatgrtatctgaaac

SEQ ID NO: 38296 - DNA, 21 bp, Homo sapiens
aattttttcarttttattgaa

SEQ ID NO: 38297 - DNA, 21 bp, Homo sapiens
attttatcatygagcaaaggt

SEQ ID NO: 38298 - DNA, 21 bp, Homo sapiens
aatcgaggaayggtacaagga

SEQ ID NO: 38299 - DNA, 21 bp, Homo sapiens
tcctgcgttcyttggagattt

SEQ ID NO: 38300 - DNA, 21 bp, Homo sapiens
catcccacagkgaaatccacc

SEQ ID NO: 38301 - DNA, 21 bp, Homo sapiens
agacagaaccytgggagttgc

SEQ ID NO: 38302 - DNA, 21 bp, Homo sapiens
atagcaattgycatcatagta

SEQ ID NO: 38303 - DNA, 21 bp, Homo sapiens
gctccaggacytgtacatagt

SEQ ID NO: 38304 - DNA, 21 bp, Homo sapiens
tgatgcttggraccccagagc

SEQ ID NO: 38305 - DNA, 21 bp, Homo sapiens
aataggaattkctccttcgac

SEQ ID NO: 38306 - DNA, 21 bp, Homo sapiens
ttttcccccartaaaattact

SEQ ID NO: 38307 - DNA, 21 bp, Homo sapiens
ctttttttttwaagaagttta

SEQ ID NO: 38308 - DNA, 21 bp, Homo sapiens
tctggagggaygcaagaatac

SEQ ID NO: 38309 - DNA, 21 bp, Homo sapiens
agagaagatgygggagactgt

SEQ ID NO: 38310 - DNA, 21 bp, Homo sapiens
ctcatttgacrtaaagactca

SEQ ID NO: 38311 - DNA, 21 bp, Homo sapiens
cttgtgtgctracttgatcta

SEQ ID NO: 38312 - DNA, 21 bp, Homo sapiens
tgatggcatcsggattctctc

SEQ ID NO: 38313 - DNA, 21 bp, Homo sapiens
cctcctcataygggtgctaag

SEQ ID NO: 38314 - DNA, 21 bp, Homo sapiens
ttcccaggctyactaggggtg

SEQ ID NO: 38315 - DNA, 21 bp, Homo sapiens
ggggccccacragattcctgc

SEQ ID NO: 38316 - DNA, 21 bp, Homo sapiens
atggtgccgartcataaacag

SEQ ID NO: 38317 - DNA, 21 bp, Homo sapiens
gcacctgggcygtagttgtct

SEQ ID NO: 38318 - DNA, 21 bp, Homo sapiens
ctgcattcagwctttttaagg

SEQ ID NO: 38319 - DNA, 21 bp, Homo sapiens
ctcccaccttragtgccagtg

SEQ ID NO: 38320 - DNA, 21 bp, Homo sapiens
gccagataatygcaccaccag

SEQ ID NO: 38321 - DNA, 21 bp, Homo sapiens
gtgatagactktgacagtgtc

SEQ ID NO: 38322 - DNA, 21 bp, Homo sapiens
atgtcttaatkataaagaaaa

SEQ ID NO: 38323 - DNA, 21 bp, Homo sapiens
aggaataattwcgctccaata

SEQ ID NO: 38324 - DNA, 21 bp, Homo sapiens
aatgttcttcrtgcacctgaa

SEQ ID NO: 38325 - DNA, 21 bp, Homo sapiens
tctgagctgtrttttgtggaa

SEQ ID NO: 38326 - DNA, 21 bp, Homo sapiens
ttttcctgacwtttcctaatg

SEQ ID NO: 38327 - DNA, 21 bp, Homo sapiens
cggcctttccrtgagacagtg

SEQ ID NO: 38328 - DNA, 21 bp, Homo sapiens
tgccatatagycacctgtgtt

SEQ ID NO: 38329 - DNA, 21 bp, Homo sapiens
tggacttccgrtttacagaaa

SEQ ID NO: 38330 - DNA, 21 bp, Homo sapiens
atctccttcamcattttctga

SEQ ID NO: 38331 - DNA, 21 bp, Homo sapiens
acgtttggttygggaaacctg

SEQ ID NO: 38332 - DNA, 21 bp, Homo sapiens
cggggcggagrtcccccttgc

SEQ ID NO: 38333 - DNA, 21 bp, Homo sapiens
taggtgtgtcrtgggctgtgc

SEQ ID NO: 38334 - DNA, 21 bp, Homo sapiens
gagaagagtgrgggagggaag

SEQ ID NO: 38335 - DNA, 21 bp, Homo sapiens
aacgaggtatsgatacgggtc

SEQ ID NO: 38336 - DNA, 21 bp, Homo sapiens
gctccatgagytccggcaaca

SEQ ID NO: 38337 - DNA, 21 bp, Homo sapiens
atgccagtccygacagagcat

SEQ ID NO: 38338 - DNA, 21 bp, Homo sapiens
acctgtggcasttaatgctgt

SEQ ID NO: 38339 - DNA, 21 bp, Homo sapiens
tgaacctcttygtattccttt

SEQ ID NO: 38340 - DNA, 21 bp, Homo sapiens
gtaatgggagrgaaccatgca

SEQ ID NO: 38341 - DNA, 21 bp, Homo sapiens
ctggggtctcrctcagccttc

SEQ ID NO: 38342 - DNA, 21 bp, Homo sapiens
ctgatttcgcrcagcctgttg

SEQ ID NO: 38343 - DNA, 21 bp, Homo sapiens
cttcccgcacrgaatctgcgg

SEQ ID NO: 38344 - DNA, 21 bp, Homo sapiens
ccgcactcacrtcagtggcct

SEQ ID NO: 38345 - DNA, 21 bp, Homo sapiens
cagccgaggtktaacgcaggg

SEQ ID NO: 38346 - DNA, 21 bp, Homo sapiens
attctacagcsttgctttcct

SEQ ID NO: 38347 - DNA, 21 bp, Homo sapiens
tctggcaccgmagatagtcta

SEQ ID NO: 38348 - DNA, 21 bp, Homo sapiens
gcgatcatacrttctttgtct

SEQ ID NO: 38349 - DNA, 21 bp, Homo sapiens
ttttgacaaaygcgcacacct

SEQ ID NO: 38350 - DNA, 21 bp, Homo sapiens
aagcttgtctrcatgggggct

SEQ ID NO: 38351 - DNA, 21 bp, Homo sapiens
tagatgttaarttcatacttg

SEQ ID NO: 38352 - DNA, 21 bp, Homo sapiens
ggaagcaagtyaaagaatttg

SEQ ID NO: 38353 - DNA, 21 bp, Homo sapiens
actaaagtaayggcaagtacc

SEQ ID NO: 38354 - DNA, 21 bp, Homo sapiens
tgagacataaytggtgtcaat

SEQ ID NO: 38355 - DNA, 21 bp, Homo sapiens
ggactggagcygacagacact

SEQ ID NO: 38356 - DNA, 21 bp, Homo sapiens
ttcctctatcrttgtcatgct

SEQ ID NO: 38357 - DNA, 21 bp, Homo sapiens
ttagtaaataygctgacttcc

SEQ ID NO: 38358 - DNA, 21 bp, Homo sapiens
taccatgtgcrgttactaatg

SEQ ID NO: 38359 - DNA, 21 bp, Homo sapiens
cttaagaagarcctagagcaa

SEQ ID NO: 38360 - DNA, 21 bp, Homo sapiens
aagtgaattcytagtcacagt

SEQ ID NO: 38361 - DNA, 21 bp, Homo sapiens
attagattttycccttgatct

SEQ ID NO: 38362 - DNA, 21 bp, Homo sapiens
ttgtgaatggyacggtgttga

SEQ ID NO: 38363 - DNA, 21 bp, Homo sapiens
gactgaatcartttttaagaa

SEQ ID NO: 38364 - DNA, 21 bp, Homo sapiens
tagatagatasataagactac

SEQ ID NO: 38365 - DNA, 21 bp, Homo sapiens
tttcagctcarccatttaccg

SEQ ID NO: 38366 - DNA, 21 bp, Homo sapiens
ataatatcttkttccatttta

SEQ ID NO: 38367 - DNA, 21 bp, Homo sapiens
aaatcccacayctgtgcatca

SEQ ID NO: 38368 - DNA, 21 bp, Homo sapiens
cttgaaagaaygattattgcc

SEQ ID NO: 38369 - DNA, 21 bp, Homo sapiens
tgtgttgaatkaatgcatggg

SEQ ID NO: 38370 - DNA, 21 bp, Homo sapiens
tgtggacacartaggaaagaa

SEQ ID NO: 38371 - DNA, 21 bp, Homo sapiens
ctgtgctgggmagtagcgggg

SEQ ID NO: 38372 - DNA, 21 bp, Homo sapiens
ctacagcaagscttgctaaaa

SEQ ID NO: 38373 - DNA, 21 bp, Homo sapiens
tcataccattraatatcaaat

SEQ ID NO: 38374 - DNA, 21 bp, Homo sapiens
cccagaggaastaatttatca

SEQ ID NO: 38375 - DNA, 21 bp, Homo sapiens
tatcaaggtawgattggagag

SEQ ID NO: 38376 - DNA, 21 bp, Homo sapiens
tttgtcttgcrgagggtttct

SEQ ID NO: 38377 - DNA, 21 bp, Homo sapiens
ggtattatacyattttcagaa

SEQ ID NO: 38378 - DNA, 21 bp, Homo sapiens
gtgaacattcrtgaagtatag

SEQ ID NO: 38379 - DNA, 21 bp, Homo sapiens
aagctagaaakataacatctg

SEQ ID NO: 38380 - DNA, 21 bp, Homo sapiens
acttagagtgrtatgcaactt

SEQ ID NO: 38381 - DNA, 21 bp, Homo sapiens
cactttctaaracagcaagat

SEQ ID NO: 38382 - DNA, 21 bp, Homo sapiens
acctgctttcyagtacgtgtg

SEQ ID NO: 38383 - DNA, 21 bp, Homo sapiens
gtgggcagaasgaagccagcc

SEQ ID NO: 38384 - DNA, 21 bp, Homo sapiens
aaggactagaygagttttgag

SEQ ID NO: 38385 - DNA, 21 bp, Homo sapiens
atttcacagaragggcaaata

SEQ ID NO: 38386 - DNA, 21 bp, Homo sapiens
tttgtcttcaycaagataaag

SEQ ID NO: 38387 - DNA, 21 bp, Homo sapiens
ctagtggtctsaaaggattgt

SEQ ID NO: 38388 - DNA, 21 bp, Homo sapiens
atacttacctygagggttctt

SEQ ID NO: 38389 - DNA, 21 bp, Homo sapiens
agaagtggacyaagatacagg

SEQ ID NO: 38390 - DNA, 21 bp, Homo sapiens
ggattcctctsagtccagaca

SEQ ID NO: 38391 - DNA, 21 bp, Homo sapiens
ctcctgcaccygtttgcacga

SEQ ID NO: 38392 - DNA, 21 bp, Homo sapiens
caaatggtccrtggagatagg

SEQ ID NO: 38393 - DNA, 21 bp, Homo sapiens
cagcttcaacraaaatgtacc

SEQ ID NO: 38394 - DNA, 21 bp, Homo sapiens
taataagcagyagccccagct

SEQ ID NO: 38395 - DNA, 21 bp, Homo sapiens
ctggaagcaaycacccttttc

SEQ ID NO: 38396 - DNA, 21 bp, Homo sapiens
gcaactgaacyggtttacagc

SEQ ID NO: 38397 - DNA, 21 bp, Homo sapiens
ctggctaaatrccaacaagta

SEQ ID NO: 38398 - DNA, 21 bp, Homo sapiens
aggaagatttmttagaaaggg

SEQ ID NO: 38399 - DNA, 21 bp, Homo sapiens
tcctcattgcyagtgacaggc

SEQ ID NO: 38400 - DNA, 21 bp, Homo sapiens
aataatcaccygcttgagtct

SEQ ID NO: 38401 - DNA, 21 bp, Homo sapiens
cttctcacatrtggttagggc

SEQ ID NO: 38402 - DNA, 21 bp, Homo sapiens
ttctatttackgagcaattag

SEQ ID NO: 38403 - DNA, 21 bp, Homo sapiens
aatcacctccrtgctctttca

SEQ ID NO: 38404 - DNA, 21 bp, Homo sapiens
ctgtcagatcytaaagccaaa

SEQ ID NO: 38405 - DNA, 21 bp, Homo sapiens
cctggggtcaytaaaaaaaaa

SEQ ID NO: 38406 - DNA, 21 bp, Homo sapiens
ctggcttcgaygcctctagca

SEQ ID NO: 38407 - DNA, 21 bp, Homo sapiens
ctgatgttatmgtgaacctga

SEQ ID NO: 38408 - DNA, 21 bp, Homo sapiens
gaggccattgsaccctgctca

SEQ ID NO: 38409 - DNA, 21 bp, Homo sapiens
taaaaatttayataggaagtt

SEQ ID NO: 38410 - DNA, 21 bp, Homo sapiens
tgatcaaaacrtgaggatgag

SEQ ID NO: 38411 - DNA, 21 bp, Homo sapiens
gacagaatggyccaccattgc

SEQ ID NO: 38412 - DNA, 21 bp, Homo sapiens
aaggttgagcrtcaccctctg

SEQ ID NO: 38413 - DNA, 21 bp, Homo sapiens
accaggaaggraggccgctgc

SEQ ID NO: 38414 - DNA, 21 bp, Homo sapiens
tctaccctgaygccagcgtcc

SEQ ID NO: 38415 - DNA, 21 bp, Homo sapiens
gaaaaaaggtwcctttcaaaa

SEQ ID NO: 38416 - DNA, 21 bp, Homo sapiens
gaaaagggackcctatccagt

SEQ ID NO: 38417 - DNA, 21 bp, Homo sapiens
tgacgatggtrggtgcaggtc

SEQ ID NO: 38418 - DNA, 21 bp, Homo sapiens
gagcttcctaygggtgcccat

SEQ ID NO: 38419 - DNA, 21 bp, Homo sapiens
agctctcaagrtccataaaat

SEQ ID NO: 38420 - DNA, 21 bp, Homo sapiens
ttgcagagatrtgatgctagg

SEQ ID NO: 38421 - DNA, 21 bp, Homo sapiens
ggatagctctraagcctgctg

SEQ ID NO: 38422 - DNA, 21 bp, Homo sapiens
ggatgtccctycttgggcttc

SEQ ID NO: 38423 - DNA, 21 bp, Homo sapiens
actagaggcgyccccgcagcc

SEQ ID NO: 38424 - DNA, 21 bp, Homo sapiens
aggtatgtcayctctttgagc

SEQ ID NO: 38425 - DNA, 21 bp, Homo sapiens
gttatttaaartcgacatttt

SEQ ID NO: 38426 - DNA, 21 bp, Homo sapiens
tgtgaagcggktgtgcaagct

SEQ ID NO: 38427 - DNA, 21 bp, Homo sapiens
cacagtattcwggctgctggg

SEQ ID NO: 38428 - DNA, 21 bp, Homo sapiens
tgtcactgatratgatctgct

SEQ ID NO: 38429 - DNA, 21 bp, Homo sapiens
aaacgctgcaygtaaaaaggc

SEQ ID NO: 38430 - DNA, 21 bp, Homo sapiens
aactgtgtttwattgttttgg

SEQ ID NO: 38431 - DNA, 21 bp, Homo sapiens
atgtaaactayggactgtagg

SEQ ID NO: 38432 - DNA, 21 bp, Homo sapiens
ccacactaccmtgccaagcta

SEQ ID NO: 38433 - DNA, 21 bp, Homo sapiens
tgcaaggccgwgggccatatc

SEQ ID NO: 38434 - DNA, 21 bp, Homo sapiens
gagatgtgggrccgccgcacg

SEQ ID NO: 38435 - DNA, 21 bp, Homo sapiens
gaccggctttytttctgatcc

SEQ ID NO: 38436 - DNA, 21 bp, Homo sapiens
tgcatggaatracttgtttca

SEQ ID NO: 38437 - DNA, 21 bp, Homo sapiens
ggcctatggcrcccaaccaca

SEQ ID NO: 38438 - DNA, 21 bp, Homo sapiens
ctgtgatcttstgaggctcaa

SEQ ID NO: 38439 - DNA, 21 bp, Homo sapiens
aaaggcctggwaactgaaaac

SEQ ID NO: 38440 - DNA, 21 bp, Homo sapiens
acagtttgaamcaagaacata

SEQ ID NO: 38441 - DNA, 21 bp, Homo sapiens
ataggactcgrctgaaaagga

SEQ ID NO: 38442 - DNA, 21 bp, Homo sapiens
cctcagcagcrggcacccggt

SEQ ID NO: 38443 - DNA, 21 bp, Homo sapiens
tcttgtgttcygaaccttggc

SEQ ID NO: 38444 - DNA, 21 bp, Homo sapiens
acttttccctyggagcacatt

SEQ ID NO: 38445 - DNA, 21 bp, Homo sapiens
actgtgtagayggcatttgag

SEQ ID NO: 38446 - DNA, 21 bp, Homo sapiens
aatgcatatawaagcacttgg

SEQ ID NO: 38447 - DNA, 21 bp, Homo sapiens
gtcttatcccrtggttttggg

SEQ ID NO: 38448 - DNA, 21 bp, Homo sapiens
aaaaagagtcytagcttcaga

SEQ ID NO: 38449 - DNA, 21 bp, Homo sapiens
agatggtaccracaggccacg

SEQ ID NO: 38450 - DNA, 21 bp, Homo sapiens
aagatgtataytcaaggacca

SEQ ID NO: 38451 - DNA, 21 bp, Homo sapiens
tgttcacctgyctaggaactc

SEQ ID NO: 38452 - DNA, 21 bp, Homo sapiens
catttcaagtyagacagagct

SEQ ID NO: 38453 - DNA, 21 bp, Homo sapiens
cttaaacttamttttaccagt

SEQ ID NO: 38454 - DNA, 21 bp, Homo sapiens
atttgtttatraggatttttg

SEQ ID NO: 38455 - DNA, 21 bp, Homo sapiens
gctaggctaasaaatcaaagg

SEQ ID NO: 38456 - DNA, 21 bp, Homo sapiens
cgcagtgcaasatgcattatt

SEQ ID NO: 38457 - DNA, 21 bp, Homo sapiens
catcacttacyacaccaatgt

SEQ ID NO: 38458 - DNA, 21 bp, Homo sapiens
aatttaggtgyttctcctata

SEQ ID NO: 38459 - DNA, 21 bp, Homo sapiens
ctttgagactrgataccaggc

SEQ ID NO: 38460 - DNA, 21 bp, Homo sapiens
gtaaagtaaaygtgctgacag

SEQ ID NO: 38461 - DNA, 21 bp, Homo sapiens
tatattatggwaattaagtgt

SEQ ID NO: 38462 - DNA, 21 bp, Homo sapiens
gtgactactastaggtgctaa

SEQ ID NO: 38463 - DNA, 21 bp, Homo sapiens
gcatttgcttrgcacttttca

SEQ ID NO: 38464 - DNA, 21 bp, Homo sapiens
ctgtttttctytaagtcctcc

SEQ ID NO: 38465 - DNA, 21 bp, Homo sapiens
aaatcacaatrtataaagtgg

SEQ ID NO: 38466 - DNA, 21 bp, Homo sapiens
cttttcactgyggaacattcc

SEQ ID NO: 38467 - DNA, 21 bp, Homo sapiens
atggtatactsgatgcgaccc

SEQ ID NO: 38468 - DNA, 21 bp, Homo sapiens
caggtttaacratattggtct

SEQ ID NO: 38469 - DNA, 21 bp, Homo sapiens
attttagggtrtgagaatcct

SEQ ID NO: 38470 - DNA, 21 bp, Homo sapiens
ttttttgtttkgtacttttta

SEQ ID NO: 38471 - DNA, 21 bp, Homo sapiens
taatatgcctstcacatctat

SEQ ID NO: 38472 - DNA, 21 bp, Homo sapiens
attttttttayctgactctct

SEQ ID NO: 38473 - DNA, 21 bp, Homo sapiens
agtgctgacaygtaaattcaa

SEQ ID NO: 38474 - DNA, 21 bp, Homo sapiens
cttcaaacaawtggctaatat

SEQ ID NO: 38475 - DNA, 21 bp, Homo sapiens
gagtggacatwtgcccaagac

SEQ ID NO: 38476 - DNA, 21 bp, Homo sapiens
ccttctctacygaggctggct

SEQ ID NO: 38477 - DNA, 21 bp, Homo sapiens
tgggcacatgrgagagaacac

SEQ ID NO: 38478 - DNA, 21 bp, Homo sapiens
tgacattgaaygtattaacta

SEQ ID NO: 38479 - DNA, 21 bp, Homo sapiens
ctggtgtaacmcaagaggtag

SEQ ID NO: 38480 - DNA, 21 bp, Homo sapiens
tttgtgagccraacagcataa

SEQ ID NO: 38481 - DNA, 21 bp, Homo sapiens
gtttcttgcartcgtgtattc

SEQ ID NO: 38482 - DNA, 21 bp, Homo sapiens
ggaagaaggcrctgggatcct

SEQ ID NO: 38483 - DNA, 21 bp, Homo sapiens
cagttgctagrgataagacca

SEQ ID NO: 38484 - DNA, 21 bp, Homo sapiens
ttcattgttcygggcatttgg

SEQ ID NO: 38485 - DNA, 21 bp, Homo sapiens
gtgaacaaatrgaaaaaaata

SEQ ID NO: 38486 - DNA, 21 bp, Homo sapiens
aggggaaatasaatatgacta

SEQ ID NO: 38487 - DNA, 21 bp, Homo sapiens
aaaattctacrtgtatccagt

SEQ ID NO: 38488 - DNA, 21 bp, Homo sapiens
ataatccttayatagtcctcc

SEQ ID NO: 38489 - DNA, 21 bp, Homo sapiens
gaccagaagargtgaagatgc

SEQ ID NO: 38490 - DNA, 21 bp, Homo sapiens
taaacgtaaayatcttggaag

SEQ ID NO: 38491 - DNA, 21 bp, Homo sapiens
ggtggaagttsattattttat

SEQ ID NO: 38492 - DNA, 21 bp, Homo sapiens
tgagttccacrgaagttgaat

SEQ ID NO: 38493 - DNA, 21 bp, Homo sapiens
tgtctgaacartttctgaaga

SEQ ID NO: 38494 - DNA, 21 bp, Homo sapiens
tctagtgcagrttcaaaaaaa

SEQ ID NO: 38495 - DNA, 21 bp, Homo sapiens
cccaatgcctraaggttggaa

SEQ ID NO: 38496 - DNA, 21 bp, Homo sapiens
ttggagaaacytttctagagc

SEQ ID NO: 38497 - DNA, 21 bp, Homo sapiens
tgcttatttayacttatggtt

SEQ ID NO: 38498 - DNA, 21 bp, Homo sapiens
ctacttagcamcttactggag

SEQ ID NO: 38499 - DNA, 21 bp, Homo sapiens
atcttggcagraagggaagaa

SEQ ID NO: 38500 - DNA, 21 bp, Homo sapiens
aaatgaagagrgtctgtagtt

SEQ ID NO: 38501 - DNA, 21 bp, Homo sapiens
tctacttccgratatacaact

SEQ ID NO: 38502 - DNA, 21 bp, Homo sapiens
aagagtgaatraaagttgaaa

SEQ ID NO: 38503 - DNA, 21 bp, Homo sapiens
gttctgataayaaaattagca

SEQ ID NO: 38504 - DNA, 21 bp, Homo sapiens
gacaagacttytttggcatct

SEQ ID NO: 38505 - DNA, 21 bp, Homo sapiens
cgagtaaattkaaagattatt

SEQ ID NO: 38506 - DNA, 21 bp, Homo sapiens
gaagtagatgkctggacagaa

SEQ ID NO: 38507 - DNA, 21 bp, Homo sapiens
ccaggtctcargttagctgtc

SEQ ID NO: 38508 - DNA, 21 bp, Homo sapiens
atctgaccacygtacttctct

SEQ ID NO: 38509 - DNA, 21 bp, Homo sapiens
atgatgcaagmaataagagtg

SEQ ID NO: 38510 - DNA, 21 bp, Homo sapiens
gaaggtacagsataagagaaa

SEQ ID NO: 38511 - DNA, 21 bp, Homo sapiens
tgtaaaaaaamaagacagtaa

SEQ ID NO: 38512 - DNA, 21 bp, Homo sapiens
ggagtagagcrtacgctgcct

SEQ ID NO: 38513 - DNA, 21 bp, Homo sapiens
gcatgagagayctacctccta

SEQ ID NO: 38514 - DNA, 21 bp, Homo sapiens
tactctttttrcagagcacag

SEQ ID NO: 38515 - DNA, 21 bp, Homo sapiens
gcttttaaccmataaagacac

SEQ ID NO: 38516 - DNA, 21 bp, Homo sapiens
acttaggagtyacagtgcaaa

SEQ ID NO: 38517 - DNA, 21 bp, Homo sapiens
tggggaaccaygaataactca

SEQ ID NO: 38518 - DNA, 21 bp, Homo sapiens
aatatgtggcrtttattgact

SEQ ID NO: 38519 - DNA, 21 bp, Homo sapiens
atgttctagayccataggtta

SEQ ID NO: 38520 - DNA, 21 bp, Homo sapiens
gtttgtggatraaaaagaacc

SEQ ID NO: 38521 - DNA, 21 bp, Homo sapiens
actagaagttygtctcttgcc

SEQ ID NO: 38522 - DNA, 21 bp, Homo sapiens
atcagaaactrtttatccggc

SEQ ID NO: 38523 - DNA, 21 bp, Homo sapiens
acttgcacatycctgattttt

SEQ ID NO: 38524 - DNA, 21 bp, Homo sapiens
ttgataggcaytcaaaaaata

SEQ ID NO: 38525 - DNA, 21 bp, Homo sapiens
ttagacacctstgcccagcgg

SEQ ID NO: 38526 - DNA, 21 bp, Homo sapiens
tctacagatarttcagaaacc

SEQ ID NO: 38527 - DNA, 21 bp, Homo sapiens
tccttaacaaygttctaggct

SEQ ID NO: 38528 - DNA, 21 bp, Homo sapiens
ggtagtttggrtgtttatgca

SEQ ID NO: 38529 - DNA, 21 bp, Homo sapiens
ggtattgggargctcttctga

SEQ ID NO: 38530 - DNA, 21 bp, Homo sapiens
accgtatgaayaagggatgta

SEQ ID NO: 38531 - DNA, 21 bp, Homo sapiens
gaaacaacttkgaaattccca

SEQ ID NO: 38532 - DNA, 21 bp, Homo sapiens
aaggagcctcstgtacaaaga

SEQ ID NO: 38533 - DNA, 21 bp, Homo sapiens
agatggtgccrtagaggataa

SEQ ID NO: 38534 - DNA, 21 bp, Homo sapiens
ctgcctcacaytgggcctcag

SEQ ID NO: 38535 - DNA, 21 bp, Homo sapiens
tgaatcacttsttgaaaaaca

SEQ ID NO: 38536 - DNA, 21 bp, Homo sapiens
ggagtgacccrggtttacagc

SEQ ID NO: 38537 - DNA, 21 bp, Homo sapiens
gctagtccatmcaataaatgt

SEQ ID NO: 38538 - DNA, 21 bp, Homo sapiens
tgactttggcyttaaatgagc

SEQ ID NO: 38539 - DNA, 21 bp, Homo sapiens
ttagtaagcaygttttccaga

SEQ ID NO: 38540 - DNA, 21 bp, Homo sapiens
ttctgaaagayagaatcgtgg

SEQ ID NO: 38541 - DNA, 21 bp, Homo sapiens
gcctcaataawcggaatatag

SEQ ID NO: 38542 - DNA, 21 bp, Homo sapiens
ttttgctgtcrtgtttcttac

SEQ ID NO: 38543 - DNA, 21 bp, Homo sapiens
tagtaacaaayacaacttaca

SEQ ID NO: 38544 - DNA, 21 bp, Homo sapiens
acgtttttatrttaacaacct

SEQ ID NO: 38545 - DNA, 21 bp, Homo sapiens
tgattcatctrtggggtcctg

SEQ ID NO: 38546 - DNA, 21 bp, Homo sapiens
ggatgtcaaakaactgcactt

SEQ ID NO: 38547 - DNA, 21 bp, Homo sapiens
tgggtccgtcyctacacaatc

SEQ ID NO: 38548 - DNA, 21 bp, Homo sapiens
tagttaggagkaaggaaggca

SEQ ID NO: 38549 - DNA, 21 bp, Homo sapiens
gtagtagtgaytgtctaccaa

SEQ ID NO: 38550 - DNA, 21 bp, Homo sapiens
agaagtcaagyttggtttaaa

SEQ ID NO: 38551 - DNA, 21 bp, Homo sapiens
tagcagctacrttatggcagg

SEQ ID NO: 38552 - DNA, 21 bp, Homo sapiens
aatgtcagagrtcttgggaaa

SEQ ID NO: 38553 - DNA, 21 bp, Homo sapiens
actgtcatccyatcagtaagc

SEQ ID NO: 38554 - DNA, 21 bp, Homo sapiens
aggttaggtayccattattat

SEQ ID NO: 38555 - DNA, 21 bp, Homo sapiens
gtttaaaaacyatcagtgtaa

SEQ ID NO: 38556 - DNA, 21 bp, Homo sapiens
aaagcataagytcatggacat

SEQ ID NO: 38557 - DNA, 21 bp, Homo sapiens
atatttccccrtagtgtcttg

SEQ ID NO: 38558 - DNA, 21 bp, Homo sapiens
caccttataawcattatgcag

SEQ ID NO: 38559 - DNA, 21 bp, Homo sapiens
cccagcttccstgaccacgtc

SEQ ID NO: 38560 - DNA, 21 bp, Homo sapiens
agagaggtacrgttctttaaa

SEQ ID NO: 38561 - DNA, 21 bp, Homo sapiens
cttaccacagytattgagtag

SEQ ID NO: 38562 - DNA, 21 bp, Homo sapiens
aagaaggggasggttaggatt

SEQ ID NO: 38563 - DNA, 21 bp, Homo sapiens
aaggaaagagwtcggtaaaag

SEQ ID NO: 38564 - DNA, 21 bp, Homo sapiens
gggcaagtccyagaatctctc

SEQ ID NO: 38565 - DNA, 21 bp, Homo sapiens
gtcagtaggartcaatctctt

SEQ ID NO: 38566 - DNA, 21 bp, Homo sapiens
cctttcgttasaataatcacg

SEQ ID NO: 38567 - DNA, 21 bp, Homo sapiens
aacaagaaacwttcagcacaa

SEQ ID NO: 38568 - DNA, 21 bp, Homo sapiens
cttgcaactcrtggcatacct

SEQ ID NO: 38569 - DNA, 21 bp, Homo sapiens
aaaaatactaycaggactggg

SEQ ID NO: 38570 - DNA, 21 bp, Homo sapiens
ttagcggttaycagcaggtga

SEQ ID NO: 38571 - DNA, 21 bp, Homo sapiens
cccctttcctygctaatttat

SEQ ID NO: 38572 - DNA, 21 bp, Homo sapiens
ctgattatatsaaaaagggat

SEQ ID NO: 38573 - DNA, 21 bp, Homo sapiens
tgtggattcakctccatgcaa

SEQ ID NO: 38574 - DNA, 21 bp, Homo sapiens
ggagaaagtaygttgatcaca

SEQ ID NO: 38575 - DNA, 21 bp, Homo sapiens
gaaagtggaaratatttagga

SEQ ID NO: 38576 - DNA, 21 bp, Homo sapiens
gtacagtgcawactcatatat

SEQ ID NO: 38577 - DNA, 21 bp, Homo sapiens
gaagaaaaaargtcatctgaa

SEQ ID NO: 38578 - DNA, 21 bp, Homo sapiens
aggatcaggaraagtcttcat

SEQ ID NO: 38579 - DNA, 21 bp, Homo sapiens
attatccgtamatcttcaaac

SEQ ID NO: 38580 - DNA, 21 bp, Homo sapiens
ggaaagggtawcaaagataag

SEQ ID NO: 38581 - DNA, 21 bp, Homo sapiens
tgctgatctayatatggccaa

SEQ ID NO: 38582 - DNA, 21 bp, Homo sapiens
cctatgcttamaacctcaacg

SEQ ID NO: 38583 - DNA, 21 bp, Homo sapiens
gaatccactgmaatatttgct

SEQ ID NO: 38584 - DNA, 21 bp, Homo sapiens
tcttgaggacrgggatcattg

SEQ ID NO: 38585 - DNA, 21 bp, Homo sapiens
tgttcccatgytcagttcaaa

SEQ ID NO: 38586 - DNA, 21 bp, Homo sapiens
ccattttaaaraggagattac

SEQ ID NO: 38587 - DNA, 21 bp, Homo sapiens
cccactattgkctccttgaaa

SEQ ID NO: 38588 - DNA, 21 bp, Homo sapiens
agtctgcagargaatttgtgg

SEQ ID NO: 38589 - DNA, 21 bp, Homo sapiens
aacagtaattsttggacaagg

SEQ ID NO: 38590 - DNA, 21 bp, Homo sapiens
gccaacatccrctaaaataaa

SEQ ID NO: 38591 - DNA, 21 bp, Homo sapiens
tgtaaaactgyccaactcttt

SEQ ID NO: 38592 - DNA, 21 bp, Homo sapiens
ctgtaagctcwtcttcataac

SEQ ID NO: 38593 - DNA, 21 bp, Homo sapiens
gcttcaacaartgcttctgca

SEQ ID NO: 38594 - DNA, 21 bp, Homo sapiens
agatttctgcrtttgccacca

SEQ ID NO: 38595 - DNA, 21 bp, Homo sapiens
actattgtggwtaaagggaat

SEQ ID NO: 38596 - DNA, 21 bp, Homo sapiens
atcagtttctytttcagattc

SEQ ID NO: 38597 - DNA, 21 bp, Homo sapiens
tcctctcactstggaccaggg

SEQ ID NO: 38598 - DNA, 21 bp, Homo sapiens
tttatagatgygaaagtgtca

SEQ ID NO: 38599 - DNA, 21 bp, Homo sapiens
tcagaagagarttggggttga

SEQ ID NO: 38600 - DNA, 21 bp, Homo sapiens
ttgtaaggtaygaagaaaggg

SEQ ID NO: 38601 - DNA, 21 bp, Homo sapiens
tctgaaacaaygaatgaaatc

SEQ ID NO: 38602 - DNA, 21 bp, Homo sapiens
atgcatactgytattttctga

SEQ ID NO: 38603 - DNA, 21 bp, Homo sapiens
tgaaattgcckcagcatttat

SEQ ID NO: 38604 - DNA, 21 bp, Homo sapiens
gagacctgcartgaatcaata

SEQ ID NO: 38605 - DNA, 21 bp, Homo sapiens
gaatgtgtatwtctgcgggga

SEQ ID NO: 38606 - DNA, 21 bp, Homo sapiens
agcttctcgcsttcttacagc

SEQ ID NO: 38607 - DNA, 21 bp, Homo sapiens
gttctggtagrtatcatggag

SEQ ID NO: 38608 - DNA, 21 bp, Homo sapiens
accctaagccrtggacacctt

SEQ ID NO: 38609 - DNA, 21 bp, Homo sapiens
gtactagctgyggaggtatta

SEQ ID NO: 38610 - DNA, 21 bp, Homo sapiens
tcagcttttgrcttataggtt

SEQ ID NO: 38611 - DNA, 21 bp, Homo sapiens
gatttttagtygagaaaaatg

SEQ ID NO: 38612 - DNA, 21 bp, Homo sapiens
ataaaaacctyttcccctgac

SEQ ID NO: 38613 - DNA, 21 bp, Homo sapiens
cttccagcctyctcctgacct

SEQ ID NO: 38614 - DNA, 21 bp, Homo sapiens
gaaagtgagtrtacaaatgga

SEQ ID NO: 38615 - DNA, 21 bp, Homo sapiens
ttagtgacagrataaaatcac

SEQ ID NO: 38616 - DNA, 21 bp, Homo sapiens
aggtctacccygggcttgttt

SEQ ID NO: 38617 - DNA, 21 bp, Homo sapiens
ttggttaacaractagaaaat

SEQ ID NO: 38618 - DNA, 21 bp, Homo sapiens
ggaaggagggrttacaaaaag

SEQ ID NO: 38619 - DNA, 21 bp, Homo sapiens
tcatattttayaacttagcta

SEQ ID NO: 38620 - DNA, 21 bp, Homo sapiens
gtatgtttttrtaaggctcct

SEQ ID NO: 38621 - DNA, 21 bp, Homo sapiens
tttatgcttawgtgccctccc

SEQ ID NO: 38622 - DNA, 21 bp, Homo sapiens
cgacctgtgtrtcagcatgcc

SEQ ID NO: 38623 - DNA, 21 bp, Homo sapiens
acacacatttyttctttgtgt

SEQ ID NO: 38624 - DNA, 21 bp, Homo sapiens
taagttgttcygtatgatagt

SEQ ID NO: 38625 - DNA, 21 bp, Homo sapiens
aacacgtcatsatgagaactg

SEQ ID NO: 38626 - DNA, 21 bp, Homo sapiens
gtcttaatgcrctaatatgga

SEQ ID NO: 38627 - DNA, 21 bp, Homo sapiens
agtcagtgcartgtgatatgg

SEQ ID NO: 38628 - DNA, 21 bp, Homo sapiens
atttattgtaytgcaagaaga

SEQ ID NO: 38629 - DNA, 21 bp, Homo sapiens
tttgtatataycacccttcag

SEQ ID NO: 38630 - DNA, 21 bp, Homo sapiens
gtataaacttyacatttccta

SEQ ID NO: 38631 - DNA, 21 bp, Homo sapiens
aatcttccatrgcactgtctc

SEQ ID NO: 38632 - DNA, 21 bp, Homo sapiens
attatatctgyaggcctataa

SEQ ID NO: 38633 - DNA, 21 bp, Homo sapiens
acaaaaagtgratttaaccag

SEQ ID NO: 38634 - DNA, 21 bp, Homo sapiens
tattggaccamgttcacattt

SEQ ID NO: 38635 - DNA, 21 bp, Homo sapiens
actattgagaytagatgcaga

SEQ ID NO: 38636 - DNA, 21 bp, Homo sapiens
gcagttcgtgrcccttacgta

SEQ ID NO: 38637 - DNA, 21 bp, Homo sapiens
caggcaattaygagtactagg

SEQ ID NO: 38638 - DNA, 21 bp, Homo sapiens
ttttaaacctrcaaatcacac

SEQ ID NO: 38639 - DNA, 21 bp, Homo sapiens
agtggggcacmaattctttca

SEQ ID NO: 38640 - DNA, 21 bp, Homo sapiens
atgactttacyttcccaggga

SEQ ID NO: 38641 - DNA, 21 bp, Homo sapiens
caaaaatagckcagctgatgg

SEQ ID NO: 38642 - DNA, 21 bp, Homo sapiens
taaatagagargccttaagga

SEQ ID NO: 38643 - DNA, 21 bp, Homo sapiens
caacagaccckataatcctca

SEQ ID NO: 38644 - DNA, 21 bp, Homo sapiens
agggcaccttyagccagtggt

SEQ ID NO: 38645 - DNA, 21 bp, Homo sapiens
ctaccttgtaygtaactatgt

SEQ ID NO: 38646 - DNA, 21 bp, Homo sapiens
acttgtaggtrgaaagtgtag

SEQ ID NO: 38647 - DNA, 21 bp, Homo sapiens
ctctacagtawctccatcaac

SEQ ID NO: 38648 - DNA, 21 bp, Homo sapiens
tagtaaccacrgaggaaaact

SEQ ID NO: 38649 - DNA, 21 bp, Homo sapiens
tgctgggacgyctttgtcaac

SEQ ID NO: 38650 - DNA, 21 bp, Homo sapiens
agggggcttgrtgaggaagag

SEQ ID NO: 38651 - DNA, 21 bp, Homo sapiens
agaataaccaycaaactacca

SEQ ID NO: 38652 - DNA, 21 bp, Homo sapiens
ctagacctgcraggccatcac

SEQ ID NO: 38653 - DNA, 21 bp, Homo sapiens
gccacagagaygaaacaggtg

SEQ ID NO: 38654 - DNA, 21 bp, Homo sapiens
tatggcttccytggcacctcc

SEQ ID NO: 38655 - DNA, 21 bp, Homo sapiens
aggcagtctcrcatgtgtcct

SEQ ID NO: 38656 - DNA, 21 bp, Homo sapiens
actctgtaacraggtgtcaac

SEQ ID NO: 38657 - DNA, 21 bp, Homo sapiens
actgtttagcraacaagaaaa

SEQ ID NO: 38658 - DNA, 21 bp, Homo sapiens
cttgagctgcrtttcccgctg

SEQ ID NO: 38659 - DNA, 21 bp, Homo sapiens
atcgggtctcraaataagcag

SEQ ID NO: 38660 - DNA, 21 bp, Homo sapiens
aatccagatcygacctgtcct

SEQ ID NO: 38661 - DNA, 21 bp, Homo sapiens
tattatgattrtgacgcccat

SEQ ID NO: 38662 - DNA, 21 bp, Homo sapiens
aatgaaacggwacagcaacag

SEQ ID NO: 38663 - DNA, 21 bp, Homo sapiens
tcaagtagaarccagacttat

SEQ ID NO: 38664 - DNA, 21 bp, Homo sapiens
cacactccctycagaggaccc

SEQ ID NO: 38665 - DNA, 21 bp, Homo sapiens
cctccctgggmtgctgtgaga

SEQ ID NO: 38666 - DNA, 21 bp, Homo sapiens
aagggagaacracgtctgggc

SEQ ID NO: 38667 - DNA, 21 bp, Homo sapiens
aaggaggagayggcgtttgcc

SEQ ID NO: 38668 - DNA, 21 bp, Homo sapiens
tgaaggtcctkctctcataac

SEQ ID NO: 38669 - DNA, 21 bp, Homo sapiens
cattttagtgwtaaaagtgtt

SEQ ID NO: 38670 - DNA, 21 bp, Homo sapiens
gtctgcatgarttgtattccc

SEQ ID NO: 38671 - DNA, 21 bp, Homo sapiens
gttaggaaggsaggttcgtgg

SEQ ID NO: 38672 - DNA, 21 bp, Homo sapiens
tcccacccccrgttcatgttg

SEQ ID NO: 38673 - DNA, 21 bp, Homo sapiens
tcgggtaatcyggtttggtca

SEQ ID NO: 38674 - DNA, 21 bp, Homo sapiens
tcttactgctyatagtccctg

SEQ ID NO: 38675 - DNA, 21 bp, Homo sapiens
agggtgtcctyggcctgcagc

SEQ ID NO: 38676 - DNA, 21 bp, Homo sapiens
ggcaagagggygccattgaag

SEQ ID NO: 38677 - DNA, 21 bp, Homo sapiens
aggaactacaytgagtacggc

SEQ ID NO: 38678 - DNA, 21 bp, Homo sapiens
cctcctagggmggtgaatatg

SEQ ID NO: 38679 - DNA, 21 bp, Homo sapiens
caagtttcagsccgtgtactg

SEQ ID NO: 38680 - DNA, 21 bp, Homo sapiens
tctgcgggtayggtggctcct

SEQ ID NO: 38681 - DNA, 21 bp, Homo sapiens
tttcagaatgsacaggatggt

SEQ ID NO: 38682 - DNA, 21 bp, Homo sapiens
tccataacctstatctgcctc

SEQ ID NO: 38683 - DNA, 21 bp, Homo sapiens
tagcacattcstacctcagtg

SEQ ID NO: 38684 - DNA, 21 bp, Homo sapiens
aacatctcaawcaaattgttt

SEQ ID NO: 38685 - DNA, 21 bp, Homo sapiens
ttcctgctggmgaccgcagct

SEQ ID NO: 38686 - DNA, 21 bp, Homo sapiens
tgaatacacgsgaagctttcg

SEQ ID NO: 38687 - DNA, 21 bp, Homo sapiens
gcccatttacrgggcatcctg

SEQ ID NO: 38688 - DNA, 21 bp, Homo sapiens
gggattggccrttcaaattct

SEQ ID NO: 38689 - DNA, 21 bp, Homo sapiens
tcacagcctcyggatgagctg

SEQ ID NO: 38690 - DNA, 21 bp, Homo sapiens
agtattgcatygtttctattc

SEQ ID NO: 38691 - DNA, 21 bp, Homo sapiens
aattatcattyggaaaggtcc

SEQ ID NO: 38692 - DNA, 21 bp, Homo sapiens
gagcccagagyggaatgtggt

SEQ ID NO: 38693 - DNA, 21 bp, Homo sapiens
tgcatccaggmcagtgccctc

SEQ ID NO: 38694 - DNA, 21 bp, Homo sapiens
ttatttccacrtgaacatttg

SEQ ID NO: 38695 - DNA, 21 bp, Homo sapiens
tctcaggggcyctgcaatact

SEQ ID NO: 38696 - DNA, 21 bp, Homo sapiens
ttgatttcagmtctcttcttg

SEQ ID NO: 38697 - DNA, 21 bp, Homo sapiens
ttagtactcawtagatctgat

SEQ ID NO: 38698 - DNA, 21 bp, Homo sapiens
ctattatcacrtttaaattga

SEQ ID NO: 38699 - DNA, 21 bp, Homo sapiens
atgcactgatyagctcagcag

SEQ ID NO: 38700 - DNA, 21 bp, Homo sapiens
ggatgtttatrgaccctgtgc

SEQ ID NO: 38701 - DNA, 21 bp, Homo sapiens
ctatcatctayggcaaactgt

SEQ ID NO: 38702 - DNA, 21 bp, Homo sapiens
gcaacttacgwtctatgcatg

SEQ ID NO: 38703 - DNA, 21 bp, Homo sapiens
tccatgcacayattttctctg

SEQ ID NO: 38704 - DNA, 21 bp, Homo sapiens
ctcttaagatrtgtcaatagg

SEQ ID NO: 38705 - DNA, 21 bp, Homo sapiens
gccgggatgasagcactgggt

SEQ ID NO: 38706 - DNA, 21 bp, Homo sapiens
tttgttaataycacgtgtaag

SEQ ID NO: 38707 - DNA, 21 bp, Homo sapiens
tccgcggggaytgcacgcaga

SEQ ID NO: 38708 - DNA, 21 bp, Homo sapiens
aaatccattgkttctatattc

SEQ ID NO: 38709 - DNA, 21 bp, Homo sapiens
tcataacaaartatacaaggt

SEQ ID NO: 38710 - DNA, 21 bp, Homo sapiens
agtcagtctartcctttcatg

SEQ ID NO: 38711 - DNA, 21 bp, Homo sapiens
attcttctttrttgttaggtg

SEQ ID NO: 38712 - DNA, 21 bp, Homo sapiens
gccccattttsgttgtatttg

SEQ ID NO: 38713 - DNA, 21 bp, Homo sapiens
tggtttgtatmcgagtctgtg

SEQ ID NO: 38714 - DNA, 21 bp, Homo sapiens
taccaatgcartactcaattt

SEQ ID NO: 38715 - DNA, 21 bp, Homo sapiens
aacatctgatygatagaacat

SEQ ID NO: 38716 - DNA, 21 bp, Homo sapiens
gcaagcaagtwgtatctcttt

SEQ ID NO: 38717 - DNA, 21 bp, Homo sapiens
accctctcacrtgttaacata

SEQ ID NO: 38718 - DNA, 21 bp, Homo sapiens
tgtatcctcayaggaagacat

SEQ ID NO: 38719 - DNA, 21 bp, Homo sapiens
actctctagamagctgctgct

SEQ ID NO: 38720 - DNA, 21 bp, Homo sapiens
gggagctatarcacttgcctc

SEQ ID NO: 38721 - DNA, 21 bp, Homo sapiens
tttgttgcacytgtttcactg

SEQ ID NO: 38722 - DNA, 21 bp, Homo sapiens
agtccgaattkgtatttcata

SEQ ID NO: 38723 - DNA, 21 bp, Homo sapiens
gaggaaatacrtttctgatgt

SEQ ID NO: 38724 - DNA, 21 bp, Homo sapiens
ctgtgtgtccmcggacaggcc

SEQ ID NO: 38725 - DNA, 21 bp, Homo sapiens
cacgccaccaycattgggaaa

SEQ ID NO: 38726 - DNA, 21 bp, Homo sapiens
tggacgcggtragggtgctag

SEQ ID NO: 38727 - DNA, 21 bp, Homo sapiens
cttaggcattygttcttatca

SEQ ID NO: 38728 - DNA, 21 bp, Homo sapiens
attgtggtggkcaatttattc

SEQ ID NO: 38729 - DNA, 21 bp, Homo sapiens
cagagatcacrccacagggcc

SEQ ID NO: 38730 - DNA, 21 bp, Homo sapiens
gtaaaccggcrcagctcttct

SEQ ID NO: 38731 - DNA, 21 bp, Homo sapiens
cccagcggtgragaactactt

SEQ ID NO: 38732 - DNA, 21 bp, Homo sapiens
agagtgacccygctccacatg

SEQ ID NO: 38733 - DNA, 21 bp, Homo sapiens
ggctgaagtgyagtcgcatga

SEQ ID NO: 38734 - DNA, 21 bp, Homo sapiens
tacagcaacamacagctccgg

SEQ ID NO: 38735 - DNA, 21 bp, Homo sapiens
tcctagtgcartttaatgact

SEQ ID NO: 38736 - DNA, 21 bp, Homo sapiens
cactccaagcytccactacac

SEQ ID NO: 38737 - DNA, 21 bp, Homo sapiens
ctcgcattccstttgcaatgg

SEQ ID NO: 38738 - DNA, 21 bp, Homo sapiens
accccttgaayatgaacttgc

SEQ ID NO: 38739 - DNA, 21 bp, Homo sapiens
gtcattagatkaaatatgtta

SEQ ID NO: 38740 - DNA, 21 bp, Homo sapiens
ctgtgaatccyagtggttttc

SEQ ID NO: 38741 - DNA, 21 bp, Homo sapiens
tgagatggggmaggttccagg

SEQ ID NO: 38742 - DNA, 21 bp, Homo sapiens
gtagcaacatrcaacaactgt

SEQ ID NO: 38743 - DNA, 21 bp, Homo sapiens
gggatggagargagcacactc

SEQ ID NO: 38744 - DNA, 21 bp, Homo sapiens
ttttgctgctyattcaggata

SEQ ID NO: 38745 - DNA, 21 bp, Homo sapiens
gaatgcttcamataaattctg

SEQ ID NO: 38746 - DNA, 21 bp, Homo sapiens
aaagcagtcamcggggtagca

SEQ ID NO: 38747 - DNA, 21 bp, Homo sapiens
catttaaaagyggcaggaagc

SEQ ID NO: 38748 - DNA, 21 bp, Homo sapiens
acagaagaccsggtcccaaat

SEQ ID NO: 38749 - DNA, 21 bp, Homo sapiens
agagacacacrtaaaatccag

SEQ ID NO: 38750 - DNA, 21 bp, Homo sapiens
atcctgtttcrtggctctatg

SEQ ID NO: 38751 - DNA, 21 bp, Homo sapiens
acttcatgcaktcaactatta

SEQ ID NO: 38752 - DNA, 21 bp, Homo sapiens
tcatctgcaawtgatttcata

SEQ ID NO: 38753 - DNA, 21 bp, Homo sapiens
tatggattaaytggaggtaaa

SEQ ID NO: 38754 - DNA, 21 bp, Homo sapiens
taatgagccaytgctattgaa

SEQ ID NO: 38755 - DNA, 21 bp, Homo sapiens
ctaggcccccyggctgactgt

SEQ ID NO: 38756 - DNA, 21 bp, Homo sapiens
atgcccagagwcccctggaga

SEQ ID NO: 38757 - DNA, 21 bp, Homo sapiens
cgttacccacrttaccccttc

SEQ ID NO: 38758 - DNA, 21 bp, Homo sapiens
atacaggagakattgatgagg

SEQ ID NO: 38759 - DNA, 21 bp, Homo sapiens
ctctgggaggsaggtggtgct

SEQ ID NO: 38760 - DNA, 21 bp, Homo sapiens
ctctgagctgragaccctcgg

SEQ ID NO: 38761 - DNA, 21 bp, Homo sapiens
acacaggtgaygccagggccc

SEQ ID NO: 38762 - DNA, 21 bp, Homo sapiens
gtctcttgacrttggattttt

SEQ ID NO: 38763 - DNA, 21 bp, Homo sapiens
gaaagcactgyggaggctcca

SEQ ID NO: 38764 - DNA, 21 bp, Homo sapiens
ccaggaactayggtttctgca

SEQ ID NO: 38765 - DNA, 21 bp, Homo sapiens
tcatcaccatmagcagcactg

SEQ ID NO: 38766 - DNA, 21 bp, Homo sapiens
ggactttgtcrtgctgaaatg

SEQ ID NO: 38767 - DNA, 21 bp, Homo sapiens
cctgcatgtcrtggggagtca

SEQ ID NO: 38768 - DNA, 21 bp, Homo sapiens
agcccaggcawccatggagcc

SEQ ID NO: 38769 - DNA, 21 bp, Homo sapiens
ccaaatcaagycaatcatagt

SEQ ID NO: 38770 - DNA, 21 bp, Homo sapiens
ctggatggacrgagggcccca

SEQ ID NO: 38771 - DNA, 21 bp, Homo sapiens
gtcctgagcayggttcagctt

SEQ ID NO: 38772 - DNA, 21 bp, Homo sapiens
gaccacaaccrtggggagctg

SEQ ID NO: 38773 - DNA, 21 bp, Homo sapiens
agccaattcayagcatgaacg

SEQ ID NO: 38774 - DNA, 21 bp, Homo sapiens
aacttttcctyagcccagggc

SEQ ID NO: 38775 - DNA, 21 bp, Homo sapiens
gtcattgccartgctaacagg

SEQ ID NO: 38776 - DNA, 21 bp, Homo sapiens
agaacagacawctttgctccc

SEQ ID NO: 38777 - DNA, 21 bp, Homo sapiens
ataggtgggaracctgttcta

SEQ ID NO: 38778 - DNA, 21 bp, Homo sapiens
atggttattarcaggaaagaa

SEQ ID NO: 38779 - DNA, 21 bp, Homo sapiens
atgtgttctcyggaaatctca

SEQ ID NO: 38780 - DNA, 21 bp, Homo sapiens
gcaggtcaagmattggtggag

SEQ ID NO: 38781 - DNA, 21 bp, Homo sapiens
aatattgtctstctgcttctt

SEQ ID NO: 38782 - DNA, 21 bp, Homo sapiens
atctctcccasgttgtgaatg

SEQ ID NO: 38783 - DNA, 21 bp, Homo sapiens
tctcaggactsttagtttcag

SEQ ID NO: 38784 - DNA, 21 bp, Homo sapiens
tatttctctcrtagtgtctag

SEQ ID NO: 38785 - DNA, 21 bp, Homo sapiens
ttaaacatttrgttaaagggc

SEQ ID NO: 38786 - DNA, 21 bp, Homo sapiens
aatttggctckgggtgggaat

SEQ ID NO: 38787 - DNA, 21 bp, Homo sapiens
atgctcccgtwgtgattacta

SEQ ID NO: 38788 - DNA, 21 bp, Homo sapiens
tgctcaatgayatgagttgta

SEQ ID NO: 38789 - DNA, 21 bp, Homo sapiens
cagtgattttytaagttaact

SEQ ID NO: 38790 - DNA, 21 bp, Homo sapiens
tctcagatgcrgatgagaact

SEQ ID NO: 38791 - DNA, 21 bp, Homo sapiens
aatagtgggtygcaagggaat

SEQ ID NO: 38792 - DNA, 21 bp, Homo sapiens
aaaattccttragctcggcaa

SEQ ID NO: 38793 - DNA, 21 bp, Homo sapiens
ggcaaggccartcaagctgag

SEQ ID NO: 38794 - DNA, 21 bp, Homo sapiens
ccctaagatcrttttgaaggt

SEQ ID NO: 38795 - DNA, 21 bp, Homo sapiens
cctgcatctcygagttactgt

SEQ ID NO: 38796 - DNA, 21 bp, Homo sapiens
gagggtataargtattttgtt

SEQ ID NO: 38797 - DNA, 21 bp, Homo sapiens
atttttgtccrgcatttacca

SEQ ID NO: 38798 - DNA, 21 bp, Homo sapiens
tgtagcagccsttttcattta

SEQ ID NO: 38799 - DNA, 21 bp, Homo sapiens
tttcctttcayggcgtttcag

SEQ ID NO: 38800 - DNA, 21 bp, Homo sapiens
gtgtagcaatmtctgactgta

SEQ ID NO: 38801 - DNA, 21 bp, Homo sapiens
gatatctgttyagaatcgcta

SEQ ID NO: 38802 - DNA, 21 bp, Homo sapiens
aagggtcagargcagggtcag

SEQ ID NO: 38803 - DNA, 21 bp, Homo sapiens
ttttctgccaytgaacatctg

SEQ ID NO: 38804 - DNA, 21 bp, Homo sapiens
aaatacatgaytacggttgtc

SEQ ID NO: 38805 - DNA, 21 bp, Homo sapiens
aggaggttgcscatgtgataa

SEQ ID NO: 38806 - DNA, 21 bp, Homo sapiens
ttctgcattcytatatttcaa

SEQ ID NO: 38807 - DNA, 21 bp, Homo sapiens
tactagaacaraaacagtgat

SEQ ID NO: 38808 - DNA, 21 bp, Homo sapiens
aaagagtaaayggatggaatc

SEQ ID NO: 38809 - DNA, 21 bp, Homo sapiens
aaatgacttastgcacaatgt

SEQ ID NO: 38810 - DNA, 21 bp, Homo sapiens
aagagaactgmcgtgaaggat

SEQ ID NO: 38811 - DNA, 21 bp, Homo sapiens
cagctttccaytgtcagagaa

SEQ ID NO: 38812 - DNA, 21 bp, Homo sapiens
ttctcaaaatsgacttcacat

SEQ ID NO: 38813 - DNA, 21 bp, Homo sapiens
tcgaacatatsaaacttgaca

SEQ ID NO: 38814 - DNA, 21 bp, Homo sapiens
cttttatcgtkcaagaacaaa

SEQ ID NO: 38815 - DNA, 21 bp, Homo sapiens
ttcgctctttycacttagtaa

SEQ ID NO: 38816 - DNA, 21 bp, Homo sapiens
taatgctgatracttctcttt

SEQ ID NO: 38817 - DNA, 21 bp, Homo sapiens
ttcaatggtcrtttttcacaa

SEQ ID NO: 38818 - DNA, 21 bp, Homo sapiens
tgttgcttgayagactctcca

SEQ ID NO: 38819 - DNA, 21 bp, Homo sapiens
atgagatggtrcccggtgatc

SEQ ID NO: 38820 - DNA, 21 bp, Homo sapiens
ctgatgactaygtgccctgga

SEQ ID NO: 38821 - DNA, 21 bp, Homo sapiens
tatatctatayggtaactcca

SEQ ID NO: 38822 - DNA, 21 bp, Homo sapiens
caacaattatktctgatttat

SEQ ID NO: 38823 - DNA, 21 bp, Homo sapiens
cacaagtattrtacatttaag

SEQ ID NO: 38824 - DNA, 21 bp, Homo sapiens
tcctcgttcawatggaatgcc

SEQ ID NO: 38825 - DNA, 21 bp, Homo sapiens
gtaaatttgcrtgctgtaagt

SEQ ID NO: 38826 - DNA, 21 bp, Homo sapiens
aggggaactgrtatataacta

SEQ ID NO: 38827 - DNA, 21 bp, Homo sapiens
gcaatttgatrcaatagactt

SEQ ID NO: 38828 - DNA, 21 bp, Homo sapiens
aagaggaggasatgttctaac

SEQ ID NO: 38829 - DNA, 21 bp, Homo sapiens
ctgtgattttwataatgtcta

SEQ ID NO: 38830 - DNA, 21 bp, Homo sapiens
ggcaagaccaygctttctgaa

SEQ ID NO: 38831 - DNA, 21 bp, Homo sapiens
tagaatgattmatgctgtatc

SEQ ID NO: 38832 - DNA, 21 bp, Homo sapiens
accaagcaaarcagtttgaat

SEQ ID NO: 38833 - DNA, 21 bp, Homo sapiens
tgtaagcactrtaactgaatt

SEQ ID NO: 38834 - DNA, 21 bp, Homo sapiens
atgaagtacartgcacttttg

SEQ ID NO: 38835 - DNA, 21 bp, Homo sapiens
cttaaaaataytgacttatgt

SEQ ID NO: 38836 - DNA, 21 bp, Homo sapiens
gggcagggtaygactttcaag

SEQ ID NO: 38837 - DNA, 21 bp, Homo sapiens
ttccagttggktgcataccat

SEQ ID NO: 38838 - DNA, 21 bp, Homo sapiens
cttctaattgytccccttgtc

SEQ ID NO: 38839 - DNA, 21 bp, Homo sapiens
atggtatgtcrgtggtacagc

SEQ ID NO: 38840 - DNA, 21 bp, Homo sapiens
ccagttttcamcatagaacca

SEQ ID NO: 38841 - DNA, 21 bp, Homo sapiens
aagtatatgcrcttggaaccg

SEQ ID NO: 38842 - DNA, 21 bp, Homo sapiens
atggatgctcycttgctaaaa

SEQ ID NO: 38843 - DNA, 21 bp, Homo sapiens
gcctggaaaayattcacaaga

SEQ ID NO: 38844 - DNA, 21 bp, Homo sapiens
aagactgtatkgccattgact

SEQ ID NO: 38845 - DNA, 21 bp, Homo sapiens
aaataaacttrtgcagaacta

SEQ ID NO: 38846 - DNA, 21 bp, Homo sapiens
ttagcttaagrgtctaacata

SEQ ID NO: 38847 - DNA, 21 bp, Homo sapiens
cttggtaggtrtaaaatttaa

SEQ ID NO: 38848 - DNA, 21 bp, Homo sapiens
aaatgtctggytggcataata

SEQ ID NO: 38849 - DNA, 21 bp, Homo sapiens
aaaaccacttygtgattgact

SEQ ID NO: 38850 - DNA, 21 bp, Homo sapiens
gtgggagcctytctgtggtat

SEQ ID NO: 38851 - DNA, 21 bp, Homo sapiens
tcactgggctsaaagcaaggt

SEQ ID NO: 38852 - DNA, 21 bp, Homo sapiens
gacataccgtyggcataagct

SEQ ID NO: 38853 - DNA, 21 bp, Homo sapiens
tggtgcaaatmccaccctgga

SEQ ID NO: 38854 - DNA, 21 bp, Homo sapiens
ttggggagagyattagatttt

SEQ ID NO: 38855 - DNA, 21 bp, Homo sapiens
ccaacctgctsttgaatcaca

SEQ ID NO: 38856 - DNA, 21 bp, Homo sapiens
ttcaagaaacrcgatatttga

SEQ ID NO: 38857 - DNA, 21 bp, Homo sapiens
gaggcagagayatttacgccg

SEQ ID NO: 38858 - DNA, 21 bp, Homo sapiens
acaaatctccyagtttccagg

SEQ ID NO: 38859 - DNA, 21 bp, Homo sapiens
acgccgagggkccctggaatt

SEQ ID NO: 38860 - DNA, 21 bp, Homo sapiens
acggtgcccgragatccacct

SEQ ID NO: 38861 - DNA, 21 bp, Homo sapiens
tcgagctggtrtgaccatgct

SEQ ID NO: 38862 - DNA, 21 bp, Homo sapiens
attacatggcrtgcggcacct

SEQ ID NO: 38863 - DNA, 21 bp, Homo sapiens
aaacaggcaargttgtccaat

SEQ ID NO: 38864 - DNA, 21 bp, Homo sapiens
ctatacccttrccgaggcacg

SEQ ID NO: 38865 - DNA, 21 bp, Homo sapiens
agaatgatgtmttattataaa

SEQ ID NO: 38866 - DNA, 21 bp, Homo sapiens
gctcggcgackccatggtgaa

SEQ ID NO: 38867 - DNA, 21 bp, Homo sapiens
agactatgacrttggaaagat

SEQ ID NO: 38868 - DNA, 21 bp, Homo sapiens
aaatacaccasaggtaagacc

SEQ ID NO: 38869 - DNA, 21 bp, Homo sapiens
ttcattaaaasagtaaaaaga

SEQ ID NO: 38870 - DNA, 21 bp, Homo sapiens
gaaattttggkattagtcaga

SEQ ID NO: 38871 - DNA, 21 bp, Homo sapiens
acataatgagyagcactaggc

SEQ ID NO: 38872 - DNA, 21 bp, Homo sapiens
caaagcttttmcacatcccaa

SEQ ID NO: 38873 - DNA, 21 bp, Homo sapiens
ccttgccctargggtaaatcc

SEQ ID NO: 38874 - DNA, 21 bp, Homo sapiens
gggacctccaratgtgctgcc

SEQ ID NO: 38875 - DNA, 21 bp, Homo sapiens
ctgaccaaaartgctccttaa

SEQ ID NO: 38876 - DNA, 21 bp, Homo sapiens
tgcccccaggyggaagctata

SEQ ID NO: 38877 - DNA, 21 bp, Homo sapiens
ctgccctttgracacataatc

SEQ ID NO: 38878 - DNA, 21 bp, Homo sapiens
acatttagacrataaaactta

SEQ ID NO: 38879 - DNA, 21 bp, Homo sapiens
caaaacaagarttaacataga

SEQ ID NO: 38880 - DNA, 21 bp, Homo sapiens
ctaacatagaycttcacagac

SEQ ID NO: 38881 - DNA, 21 bp, Homo sapiens
aacaaggctcytcagtatcag

SEQ ID NO: 38882 - DNA, 21 bp, Homo sapiens
agttattgctygacccacttt

SEQ ID NO: 38883 - DNA, 21 bp, Homo sapiens
gtctgtttctstctctcacat

SEQ ID NO: 38884 - DNA, 21 bp, Homo sapiens
gtaacagtaarcaatgaaaaa

SEQ ID NO: 38885 - DNA, 21 bp, Homo sapiens
ccaaagtcaayatcaaattgt

SEQ ID NO: 38886 - DNA, 21 bp, Homo sapiens
taataagaacyttggctttcc

SEQ ID NO: 38887 - DNA, 21 bp, Homo sapiens
cctgagataaraggatgtgca

SEQ ID NO: 38888 - DNA, 21 bp, Homo sapiens
ctgaaattacrcaaatctcat

SEQ ID NO: 38889 - DNA, 21 bp, Homo sapiens
tggttcaccakgcaagaggaa

SEQ ID NO: 38890 - DNA, 21 bp, Homo sapiens
gttgaggcttrttgttacgtt

SEQ ID NO: 38891 - DNA, 21 bp, Homo sapiens
tttttgttagmgcatgtatta

SEQ ID NO: 38892 - DNA, 21 bp, Homo sapiens
tgggctgggcrcagtggctca

SEQ ID NO: 38893 - DNA, 21 bp, Homo sapiens
gccatgattcwtgctgtggtg

SEQ ID NO: 38894 - DNA, 21 bp, Homo sapiens
tcaagcagggragggacacct

SEQ ID NO: 38895 - DNA, 21 bp, Homo sapiens
aatgaggatcmacaaaaacag

SEQ ID NO: 38896 - DNA, 21 bp, Homo sapiens
aaagtgtacaratgaccaatg

SEQ ID NO: 38897 - DNA, 21 bp, Homo sapiens
gataagaacaygatttcacag

SEQ ID NO: 38898 - DNA, 21 bp, Homo sapiens
ggaaatttgayactccttttt

SEQ ID NO: 38899 - DNA, 21 bp, Homo sapiens
catcctattasttcctgatga

SEQ ID NO: 38900 - DNA, 21 bp, Homo sapiens
ggagtacaatycccctgtgat

SEQ ID NO: 38901 - DNA, 21 bp, Homo sapiens
ggaaactacarttcaagatga

SEQ ID NO: 38902 - DNA, 21 bp, Homo sapiens
atgtcttctcwctctgcaggg

SEQ ID NO: 38903 - DNA, 21 bp, Homo sapiens
gtttaccttgytgcaattctt

SEQ ID NO: 38904 - DNA, 21 bp, Homo sapiens
aataaataacrcaacatcttt

SEQ ID NO: 38905 - DNA, 21 bp, Homo sapiens
ttaatcactcrttcatttaaa

SEQ ID NO: 38906 - DNA, 21 bp, Homo sapiens
aagtggttaarcaaacagaag

SEQ ID NO: 38907 - DNA, 21 bp, Homo sapiens
agctcctattygttaggtgag

SEQ ID NO: 38908 - DNA, 21 bp, Homo sapiens
aaagccacatraaatgtttat

SEQ ID NO: 38909 - DNA, 21 bp, Homo sapiens
gagctcttttrtcttttcaat

SEQ ID NO: 38910 - DNA, 21 bp, Homo sapiens
agccgtattcyaaatttgcat

SEQ ID NO: 38911 - DNA, 21 bp, Homo sapiens
tccaaattgcygaactgattt

SEQ ID NO: 38912 - DNA, 21 bp, Homo sapiens
aaaatctgtaycctggtaaaa

SEQ ID NO: 38913 - DNA, 21 bp, Homo sapiens
cttttttataytgaggattta

SEQ ID NO: 38914 - DNA, 21 bp, Homo sapiens
aggagatcttyggttcctaac

SEQ ID NO: 38915 - DNA, 21 bp, Homo sapiens
acatcacttckgtatatttta

SEQ ID NO: 38916 - DNA, 21 bp, Homo sapiens
aaggattggamggcaggtctt

SEQ ID NO: 38917 - DNA, 21 bp, Homo sapiens
tgaaggctgtrtgatatttga

SEQ ID NO: 38918 - DNA, 21 bp, Homo sapiens
cttggtctttraaaggcttta

SEQ ID NO: 38919 - DNA, 21 bp, Homo sapiens
ttccactactrgccctattgt

SEQ ID NO: 38920 - DNA, 21 bp, Homo sapiens
aaccaaaacakctatacttat

SEQ ID NO: 38921 - DNA, 21 bp, Homo sapiens
gaactcaatgrtaaaggagac

SEQ ID NO: 38922 - DNA, 21 bp, Homo sapiens
caaaaggtagycatgaaaatg

SEQ ID NO: 38923 - DNA, 21 bp, Homo sapiens
aaagttgaggwgagtagccaa

SEQ ID NO: 38924 - DNA, 21 bp, Homo sapiens
aaagctgccayaggagaaaag

SEQ ID NO: 38925 - DNA, 21 bp, Homo sapiens
aggtcaaagcrtataactaac

SEQ ID NO: 38926 - DNA, 21 bp, Homo sapiens
taacagggagraacagagcag

SEQ ID NO: 38927 - DNA, 21 bp, Homo sapiens
ggactgtataraacaaagaaa

SEQ ID NO: 38928 - DNA, 21 bp, Homo sapiens
atagagaattrctatctgatc

SEQ ID NO: 38929 - DNA, 21 bp, Homo sapiens
atcggttttamaatatttagc

SEQ ID NO: 38930 - DNA, 21 bp, Homo sapiens
aggggttcatytggataatca

SEQ ID NO: 38931 - DNA, 21 bp, Homo sapiens
ctagaactgcsatgagcctaa

SEQ ID NO: 38932 - DNA, 21 bp, Homo sapiens
ctttaaaaggrgaaatgagta

SEQ ID NO: 38933 - DNA, 21 bp, Homo sapiens
gggtccgcagytgcagtgctt

SEQ ID NO: 38934 - DNA, 21 bp, Homo sapiens
acattttaacycctgaatcat

SEQ ID NO: 38935 - DNA, 21 bp, Homo sapiens
aggaattcacycaaatatata

SEQ ID NO: 38936 - DNA, 21 bp, Homo sapiens
acatgtccagkttctaattca

SEQ ID NO: 38937 - DNA, 21 bp, Homo sapiens
gacagttcctrgaaaaggcat

SEQ ID NO: 38938 - DNA, 21 bp, Homo sapiens
ctgacagcaakttttaccttc

SEQ ID NO: 38939 - DNA, 21 bp, Homo sapiens
tagtgcccggrtgtaaaagaa

SEQ ID NO: 38940 - DNA, 21 bp, Homo sapiens
gcactttgtckcatggtatga

SEQ ID NO: 38941 - DNA, 21 bp, Homo sapiens
cactcaaataytaatgctgct

SEQ ID NO: 38942 - DNA, 21 bp, Homo sapiens
actcaggaacytggggctctt

SEQ ID NO: 38943 - DNA, 21 bp, Homo sapiens
gtgaaagatasaagggcaaga

SEQ ID NO: 38944 - DNA, 21 bp, Homo sapiens
ggatgcctgcmagaaattgct

SEQ ID NO: 38945 - DNA, 21 bp, Homo sapiens
ggatgattccmagcctgttcc

SEQ ID NO: 38946 - DNA, 21 bp, Homo sapiens
gtagaaataasttaaactgaa

SEQ ID NO: 38947 - DNA, 21 bp, Homo sapiens
cacaaatcatyaaagactgat

SEQ ID NO: 38948 - DNA, 21 bp, Homo sapiens
gtttaaaagcsattatctata

SEQ ID NO: 38949 - DNA, 21 bp, Homo sapiens
aggtgtgagcrccagagaccc

SEQ ID NO: 38950 - DNA, 21 bp, Homo sapiens
tgagcaagacygggggctgtc

SEQ ID NO: 38951 - DNA, 21 bp, Homo sapiens
cattgttgttmctatttattc

SEQ ID NO: 38952 - DNA, 21 bp, Homo sapiens
gggtgtgcctyatacatgctt

SEQ ID NO: 38953 - DNA, 21 bp, Homo sapiens
ctgtcagagaracccccagcc

SEQ ID NO: 38954 - DNA, 21 bp, Homo sapiens
cagctcgctcmtcctgagaaa

SEQ ID NO: 38955 - DNA, 21 bp, Homo sapiens
cagagtagtakgttttctaca

SEQ ID NO: 38956 - DNA, 21 bp, Homo sapiens
cattcatgccrttgaagtcca

SEQ ID NO: 38957 - DNA, 21 bp, Homo sapiens
gggacttagcrtagttttctt

SEQ ID NO: 38958 - DNA, 21 bp, Homo sapiens
caaaatattaygctgaacgaa

SEQ ID NO: 38959 - DNA, 21 bp, Homo sapiens
cattggcaacrctggtgcctg

SEQ ID NO: 38960 - DNA, 21 bp, Homo sapiens
cgcctatgaayaggaggtttg

SEQ ID NO: 38961 - DNA, 21 bp, Homo sapiens
taagtaaacgragagatagcc

SEQ ID NO: 38962 - DNA, 21 bp, Homo sapiens
cagggccagcrgggctctggc

SEQ ID NO: 38963 - DNA, 21 bp, Homo sapiens
gagaagtgtcwcaaataagca

SEQ ID NO: 38964 - DNA, 21 bp, Homo sapiens
tttgtatccaygtttataaag

SEQ ID NO: 38965 - DNA, 21 bp, Homo sapiens
caaatatcaaygtgaggtttg

SEQ ID NO: 38966 - DNA, 21 bp, Homo sapiens
aattagacaayctgcgtagtg

SEQ ID NO: 38967 - DNA, 21 bp, Homo sapiens
catggaaaccrgcaaaaaacg

SEQ ID NO: 38968 - DNA, 21 bp, Homo sapiens
aaacagaaagrcatggaaatg

SEQ ID NO: 38969 - DNA, 21 bp, Homo sapiens
agtctcatatsttttcttctg

SEQ ID NO: 38970 - DNA, 21 bp, Homo sapiens
agtgtgttctrttaatgctag

SEQ ID NO: 38971 - DNA, 21 bp, Homo sapiens
agataatttcrgtgaccgatt

SEQ ID NO: 38972 - DNA, 21 bp, Homo sapiens
caacaggtgargagaaatata

SEQ ID NO: 38973 - DNA, 21 bp, Homo sapiens
ttaggtaggcraaaagacgaa

SEQ ID NO: 38974 - DNA, 21 bp, Homo sapiens
tctcagcttcsagcaaacaat

SEQ ID NO: 38975 - DNA, 21 bp, Homo sapiens
gcttttgttcrtgttcatttg

SEQ ID NO: 38976 - DNA, 21 bp, Homo sapiens
acagcctcatytccacttgga

SEQ ID NO: 38977 - DNA, 21 bp, Homo sapiens
tgggggatgaytggatgacta

SEQ ID NO: 38978 - DNA, 21 bp, Homo sapiens
acttgtgtttytctgcatgtt

SEQ ID NO: 38979 - DNA, 21 bp, Homo sapiens
tttgtctttcrtctgctgctt

SEQ ID NO: 38980 - DNA, 21 bp, Homo sapiens
aagataataarctataaaaag

SEQ ID NO: 38981 - DNA, 21 bp, Homo sapiens
cagaaagtccrgtgtgaagat

SEQ ID NO: 38982 - DNA, 21 bp, Homo sapiens
gcatagtagaycaccataaaa

SEQ ID NO: 38983 - DNA, 21 bp, Homo sapiens
ccacaaagagrtaccattaca

SEQ ID NO: 38984 - DNA, 21 bp, Homo sapiens
tataaaaatcyccattctaaa

SEQ ID NO: 38985 - DNA, 21 bp, Homo sapiens
acttccacagstttatgaaga

SEQ ID NO: 38986 - DNA, 21 bp, Homo sapiens
tcctttaccamgtagatagct

SEQ ID NO: 38987 - DNA, 21 bp, Homo sapiens
ttaaatttttsgatagtacag

SEQ ID NO: 38988 - DNA, 21 bp, Homo sapiens
ggcattagatytggcacacag

SEQ ID NO: 38989 - DNA, 21 bp, Homo sapiens
tgtgttctttstgttcaacat

SEQ ID NO: 38990 - DNA, 21 bp, Homo sapiens
acgactgtgasattgagtgcc

SEQ ID NO: 38991 - DNA, 21 bp, Homo sapiens
tcctggagtcrgtgggttctc

SEQ ID NO: 38992 - DNA, 21 bp, Homo sapiens
tgaaatccgcrctgtggcagc

SEQ ID NO: 38993 - DNA, 21 bp, Homo sapiens
atccctggtgytgcaggaaat

SEQ ID NO: 38994 - DNA, 21 bp, Homo sapiens
cagaacattgraagcttcctg

SEQ ID NO: 38995 - DNA, 21 bp, Homo sapiens
caggttgtcaytgtttttgcg

SEQ ID NO: 38996 - DNA, 21 bp, Homo sapiens
tacagatgggrtcagcaatct

SEQ ID NO: 38997 - DNA, 21 bp, Homo sapiens
tatttatttaygaagaagcaa

SEQ ID NO: 38998 - DNA, 21 bp, Homo sapiens
agggaggatgytgtaaattgt

SEQ ID NO: 38999 - DNA, 21 bp, Homo sapiens
cctgcatgtaygacttacaaa

SEQ ID NO: 39000 - DNA, 21 bp, Homo sapiens
gtgtagtcaaytgatagctac

SEQ ID NO: 39001 - DNA, 21 bp, Homo sapiens
tccacccaagrttatcctgca

SEQ ID NO: 39002 - DNA, 21 bp, Homo sapiens
ttaaccagggytccaggatgc

SEQ ID NO: 39003 - DNA, 21 bp, Homo sapiens
ttcattttcayaggggtcttg

SEQ ID NO: 39004 - DNA, 21 bp, Homo sapiens
tccatatgatscaggctttat

SEQ ID NO: 39005 - DNA, 21 bp, Homo sapiens
accaagcttayagagactgat

SEQ ID NO: 39006 - DNA, 21 bp, Homo sapiens
ggctggcagakactttgacag

SEQ ID NO: 39007 - DNA, 21 bp, Homo sapiens
ctttgaaatgyagaacacaaa

SEQ ID NO: 39008 - DNA, 21 bp, Homo sapiens
gtttatcttaycaaagccaaa

SEQ ID NO: 39009 - DNA, 21 bp, Homo sapiens
ttctagatccmagaagttcag

SEQ ID NO: 39010 - DNA, 21 bp, Homo sapiens
tgaaccatgtrgtagtcatct

SEQ ID NO: 39011 - DNA, 21 bp, Homo sapiens
tcttgtgtggrtggcctatta

SEQ ID NO: 39012 - DNA, 21 bp, Homo sapiens
ttcaatgcggwctgaactggc

SEQ ID NO: 39013 - DNA, 21 bp, Homo sapiens
acagggattcmacttcatgtg

SEQ ID NO: 39014 - DNA, 21 bp, Homo sapiens
aaaactgggayaagctaggaa

SEQ ID NO: 39015 - DNA, 21 bp, Homo sapiens
gagtctaccayagctggcagg

SEQ ID NO: 39016 - DNA, 21 bp, Homo sapiens
tctttcttacmggtctgctat

SEQ ID NO: 39017 - DNA, 21 bp, Homo sapiens
gtaatagtggmctctaaggca

SEQ ID NO: 39018 - DNA, 21 bp, Homo sapiens
gtttgccataygttaccagga

SEQ ID NO: 39019 - DNA, 21 bp, Homo sapiens
tttcctcattyactggtcacc

SEQ ID NO: 39020 - DNA, 21 bp, Homo sapiens
acatacttcargaagagttga

SEQ ID NO: 39021 - DNA, 21 bp, Homo sapiens
tggctaatcartgaaacagag

SEQ ID NO: 39022 - DNA, 21 bp, Homo sapiens
gtcctgctcckggaggcctcg

SEQ ID NO: 39023 - DNA, 21 bp, Homo sapiens
tgattcagcarttctatattt

SEQ ID NO: 39024 - DNA, 21 bp, Homo sapiens
tgggatgaaayctcaagctta

SEQ ID NO: 39025 - DNA, 21 bp, Homo sapiens
ggttacgaaayttgcgtaaag

SEQ ID NO: 39026 - DNA, 21 bp, Homo sapiens
cctcagtgackccggagcttc

SEQ ID NO: 39027 - DNA, 21 bp, Homo sapiens
ggagacccggygtgtggccct

SEQ ID NO: 39028 - DNA, 21 bp, Homo sapiens
ctctctagaaygttcacacac

SEQ ID NO: 39029 - DNA, 21 bp, Homo sapiens
cccaacctggrgagttagagc

SEQ ID NO: 39030 - DNA, 21 bp, Homo sapiens
catagaaagcyttgggtgtag

SEQ ID NO: 39031 - DNA, 21 bp, Homo sapiens
ggtggtaacawgatctgggct

SEQ ID NO: 39032 - DNA, 21 bp, Homo sapiens
tagcctctggrttaaggatat

SEQ ID NO: 39033 - DNA, 21 bp, Homo sapiens
ggaggctttcsgagggtgaca

SEQ ID NO: 39034 - DNA, 21 bp, Homo sapiens
cctgaatactrcttaagggaa

SEQ ID NO: 39035 - DNA, 21 bp, Homo sapiens
tccatagtgtkagatgaaaag

SEQ ID NO: 39036 - DNA, 21 bp, Homo sapiens
accgcttggtytcaatgtgtt

SEQ ID NO: 39037 - DNA, 21 bp, Homo sapiens
atattgcagcrtcatccagac

SEQ ID NO: 39038 - DNA, 21 bp, Homo sapiens
acacataatargctgttaaca

SEQ ID NO: 39039 - DNA, 21 bp, Homo sapiens
cttcaaggcayttagagtctg

SEQ ID NO: 39040 - DNA, 21 bp, Homo sapiens
tttttatcccyggtatctctt

SEQ ID NO: 39041 - DNA, 21 bp, Homo sapiens
gttgaaaaaasaggttcaatc

SEQ ID NO: 39042 - DNA, 21 bp, Homo sapiens
gactgagcagktttactctgg

SEQ ID NO: 39043 - DNA, 21 bp, Homo sapiens
ggaggcttaayttttcacttg

SEQ ID NO: 39044 - DNA, 21 bp, Homo sapiens
atgtggtctcygctctcttta

SEQ ID NO: 39045 - DNA, 21 bp, Homo sapiens
aatagaaaaaygtgtgtgcat

SEQ ID NO: 39046 - DNA, 21 bp, Homo sapiens
ttccacagggkacctggtttg

SEQ ID NO: 39047 - DNA, 21 bp, Homo sapiens
tcacttcttcygaggctgaaa

SEQ ID NO: 39048 - DNA, 21 bp, Homo sapiens
tagccagagakattcacaatg

SEQ ID NO: 39049 - DNA, 21 bp, Homo sapiens
cttacttgtcraaaattgcaa

SEQ ID NO: 39050 - DNA, 21 bp, Homo sapiens
ttaagatgcartgacatgggc

SEQ ID NO: 39051 - DNA, 21 bp, Homo sapiens
cagcgtcaccyggtaggaatc

SEQ ID NO: 39052 - DNA, 21 bp, Homo sapiens
ccttaaagagyttagaatcaa

SEQ ID NO: 39053 - DNA, 21 bp, Homo sapiens
gcattgctatytgtggagatt

SEQ ID NO: 39054 - DNA, 21 bp, Homo sapiens
gttcatcagayaagtttgtat

SEQ ID NO: 39055 - DNA, 21 bp, Homo sapiens
tacacaggtgkccatagtaag

SEQ ID NO: 39056 - DNA, 21 bp, Homo sapiens
gactaggggcragctcttttt

SEQ ID NO: 39057 - DNA, 21 bp, Homo sapiens
ttgtaaactgyagagggctgt

SEQ ID NO: 39058 - DNA, 21 bp, Homo sapiens
cttcacttttytctgaagctt

SEQ ID NO: 39059 - DNA, 21 bp, Homo sapiens
gtagaaaccayaaccccatcg

SEQ ID NO: 39060 - DNA, 21 bp, Homo sapiens
aggcaagaccyctaatttagc

SEQ ID NO: 39061 - DNA, 21 bp, Homo sapiens
atggctactcygaatttaaat

SEQ ID NO: 39062 - DNA, 21 bp, Homo sapiens
gctttggtccmctcatctctg

SEQ ID NO: 39063 - DNA, 21 bp, Homo sapiens
taataggaacmccagagaggt

SEQ ID NO: 39064 - DNA, 21 bp, Homo sapiens
gagctgatgakgtaaggatac

SEQ ID NO: 39065 - DNA, 21 bp, Homo sapiens
acagttgaaayggtggcttca

SEQ ID NO: 39066 - DNA, 21 bp, Homo sapiens
ctcttagaatygtaaggccag

SEQ ID NO: 39067 - DNA, 21 bp, Homo sapiens
tgtgtgtggcwattgaacatg

SEQ ID NO: 39068 - DNA, 21 bp, Homo sapiens
gagtgctgatrggaactccaa

SEQ ID NO: 39069 - DNA, 21 bp, Homo sapiens
ttttcactgakgagttgccct

SEQ ID NO: 39070 - DNA, 21 bp, Homo sapiens
gagctttgcasatgaagttag

SEQ ID NO: 39071 - DNA, 21 bp, Homo sapiens
agaaaactgaytgtcaaaaat

SEQ ID NO: 39072 - DNA, 21 bp, Homo sapiens
gaagctcaggragcaaacaaa

SEQ ID NO: 39073 - DNA, 21 bp, Homo sapiens
ttgcgcctgamgcctgctttc

SEQ ID NO: 39074 - DNA, 21 bp, Homo sapiens
agttccttagytatgctggag

SEQ ID NO: 39075 - DNA, 21 bp, Homo sapiens
gcgctcagtawatgctcgctg

SEQ ID NO: 39076 - DNA, 21 bp, Homo sapiens
agagtatacakttggttctaa

SEQ ID NO: 39077 - DNA, 21 bp, Homo sapiens
tacctagaaayaggatggctg

SEQ ID NO: 39078 - DNA, 21 bp, Homo sapiens
aattttagagmaaaagaagta

SEQ ID NO: 39079 - DNA, 21 bp, Homo sapiens
tgcttgttttrttgtcctccc

SEQ ID NO: 39080 - DNA, 21 bp, Homo sapiens
agcatttgacrtaattttttc

SEQ ID NO: 39081 - DNA, 21 bp, Homo sapiens
ggagagataartggaagtagg

SEQ ID NO: 39082 - DNA, 21 bp, Homo sapiens
agtggtacagwtgtccacttt

SEQ ID NO: 39083 - DNA, 21 bp, Homo sapiens
ctgctgggaaygtaaaatggt

SEQ ID NO: 39084 - DNA, 21 bp, Homo sapiens
ggtataaggcyacagaacctc

SEQ ID NO: 39085 - DNA, 21 bp, Homo sapiens
gttaggttgcwtgtcccctga

SEQ ID NO: 39086 - DNA, 21 bp, Homo sapiens
ttgacctttgytgtaggcacc

SEQ ID NO: 39087 - DNA, 21 bp, Homo sapiens
gcagacctacmatatgcttat

SEQ ID NO: 39088 - DNA, 21 bp, Homo sapiens
atgatttacaygtctataatg

SEQ ID NO: 39089 - DNA, 21 bp, Homo sapiens
taacatttgcyctccctggcc

SEQ ID NO: 39090 - DNA, 21 bp, Homo sapiens
tctcctaatayaggatctctt

SEQ ID NO: 39091 - DNA, 21 bp, Homo sapiens
gtcaacatgarggctgaaaaa

SEQ ID NO: 39092 - DNA, 21 bp, Homo sapiens
cgtaggtgtcrgaggactgaa

SEQ ID NO: 39093 - DNA, 21 bp, Homo sapiens
cagtgtgcacrtgtgattaat

SEQ ID NO: 39094 - DNA, 21 bp, Homo sapiens
attcagtaccyggtaagataa

SEQ ID NO: 39095 - DNA, 21 bp, Homo sapiens
aatgctagtamgaatgtaatt

SEQ ID NO: 39096 - DNA, 21 bp, Homo sapiens
tccttcctttsagtaaatata

SEQ ID NO: 39097 - DNA, 21 bp, Homo sapiens
ttatgtaaaamattataaagg

SEQ ID NO: 39098 - DNA, 21 bp, Homo sapiens
tttatcacttrtctcactcat

SEQ ID NO: 39099 - DNA, 21 bp, Homo sapiens
tcctgtcttaygtggctgtca

SEQ ID NO: 39100 - DNA, 21 bp, Homo sapiens
tgctaaaaaayccactgataa

SEQ ID NO: 39101 - DNA, 21 bp, Homo sapiens
tggggtaaaargggccatcag

SEQ ID NO: 39102 - DNA, 21 bp, Homo sapiens
gcctcctcatstatctacctg

SEQ ID NO: 39103 - DNA, 21 bp, Homo sapiens
attttctctgmcttctctcca

SEQ ID NO: 39104 - DNA, 21 bp, Homo sapiens
aaatcacaaawaaagttcaat

SEQ ID NO: 39105 - DNA, 21 bp, Homo sapiens
acagtattggsatatttgaaa

SEQ ID NO: 39106 - DNA, 21 bp, Homo sapiens
cctttttttcrtgtgtctcag

SEQ ID NO: 39107 - DNA, 21 bp, Homo sapiens
gctcctgaagrggctcagcgt

SEQ ID NO: 39108 - DNA, 21 bp, Homo sapiens
gaggccgtttygacaaagcac

SEQ ID NO: 39109 - DNA, 21 bp, Homo sapiens
tgcatatgtcraggagaaatg

SEQ ID NO: 39110 - DNA, 21 bp, Homo sapiens
accctgacacyggcagctgtc

SEQ ID NO: 39111 - DNA, 21 bp, Homo sapiens
cctgctgatgyccacccaggg

SEQ ID NO: 39112 - DNA, 21 bp, Homo sapiens
cacgttctccrcccacgtcta

SEQ ID NO: 39113 - DNA, 21 bp, Homo sapiens
ggcctgggaaygcaccaggac

SEQ ID NO: 39114 - DNA, 21 bp, Homo sapiens
acgtgcaaatraattgcttct

SEQ ID NO: 39115 - DNA, 21 bp, Homo sapiens
agttggtggcygctcccacgc

SEQ ID NO: 39116 - DNA, 21 bp, Homo sapiens
ctctctcatawttcacctgga

SEQ ID NO: 39117 - DNA, 21 bp, Homo sapiens
agctgatagaraacaggatat

SEQ ID NO: 39118 - DNA, 21 bp, Homo sapiens
aacactttttktattgtattt

SEQ ID NO: 39119 - DNA, 21 bp, Homo sapiens
catcaactgcmccatgaatca

SEQ ID NO: 39120 - DNA, 21 bp, Homo sapiens
atactataacrgagtaagagg

SEQ ID NO: 39121 - DNA, 21 bp, Homo sapiens
cgagcctagtmtgtttagtaa

SEQ ID NO: 39122 - DNA, 21 bp, Homo sapiens
catgctgtgcyccagacactc

SEQ ID NO: 39123 - DNA, 21 bp, Homo sapiens
cagttataaasatatgaaaag

SEQ ID NO: 39124 - DNA, 21 bp, Homo sapiens
ggaactctgargggagagagt

SEQ ID NO: 39125 - DNA, 21 bp, Homo sapiens
taggccaaccraacacctcaa

SEQ ID NO: 39126 - DNA, 21 bp, Homo sapiens
ataaaagtatyaataacacac

SEQ ID NO: 39127 - DNA, 21 bp, Homo sapiens
gctactgaagrtctctgagtt

SEQ ID NO: 39128 - DNA, 21 bp, Homo sapiens
tgtctgtggaytggaggatgt

SEQ ID NO: 39129 - DNA, 21 bp, Homo sapiens
catgcacacartacattaagg

SEQ ID NO: 39130 - DNA, 21 bp, Homo sapiens
gagtggaagtrtatattctta

SEQ ID NO: 39131 - DNA, 21 bp, Homo sapiens
agcttccccayttagcaatca

SEQ ID NO: 39132 - DNA, 21 bp, Homo sapiens
gtgatcctctstctgctccca

SEQ ID NO: 39133 - DNA, 21 bp, Homo sapiens
caccaaggccrcaggtagtta

SEQ ID NO: 39134 - DNA, 21 bp, Homo sapiens
ctgagaaaatrggtttaagtc

SEQ ID NO: 39135 - DNA, 21 bp, Homo sapiens
gaatcatggcrcagaaagata

SEQ ID NO: 39136 - DNA, 21 bp, Homo sapiens
gtggcagtcaktatatttatt

SEQ ID NO: 39137 - DNA, 21 bp, Homo sapiens
aacatttctcrttctaggctc

SEQ ID NO: 39138 - DNA, 21 bp, Homo sapiens
gcaagaaagargcattcccct

SEQ ID NO: 39139 - DNA, 21 bp, Homo sapiens
tgggaaaaatmtgttgagtta

SEQ ID NO: 39140 - DNA, 21 bp, Homo sapiens
tgaagacttgragtatcactt

SEQ ID NO: 39141 - DNA, 21 bp, Homo sapiens
agaatggaacragaaagctgt

SEQ ID NO: 39142 - DNA, 21 bp, Homo sapiens
actgccaactygctgaaatgt

SEQ ID NO: 39143 - DNA, 21 bp, Homo sapiens
gaaaggttatytgtgattcat

SEQ ID NO: 39144 - DNA, 21 bp, Homo sapiens
ggctatacagyagtcaataat

SEQ ID NO: 39145 - DNA, 21 bp, Homo sapiens
cagctccaagrtacttacaag

SEQ ID NO: 39146 - DNA, 21 bp, Homo sapiens
ctcaaaaggaygctaaataga

SEQ ID NO: 39147 - DNA, 21 bp, Homo sapiens
tccacattctyctctactcta

SEQ ID NO: 39148 - DNA, 21 bp, Homo sapiens
agtcacagccrgtcttgggcc

SEQ ID NO: 39149 - DNA, 21 bp, Homo sapiens
aatatacccaygatcacaaac

SEQ ID NO: 39150 - DNA, 21 bp, Homo sapiens
tatgtggaagrgtgtgacttg

SEQ ID NO: 39151 - DNA, 21 bp, Homo sapiens
aagctaacatyttactgaatg

SEQ ID NO: 39152 - DNA, 21 bp, Homo sapiens
ccaaatatccragggccctgg

SEQ ID NO: 39153 - DNA, 21 bp, Homo sapiens
ggctttgagcygggcattctt

SEQ ID NO: 39154 - DNA, 21 bp, Homo sapiens
aatcccctgcmgagctttgcc

SEQ ID NO: 39155 - DNA, 21 bp, Homo sapiens
agcacctacaygtttatacgt

SEQ ID NO: 39156 - DNA, 21 bp, Homo sapiens
ggcatttttaytgtggctccc

SEQ ID NO: 39157 - DNA, 21 bp, Homo sapiens
ttcaaaaaacrttagcaaaga

SEQ ID NO: 39158 - DNA, 21 bp, Homo sapiens
tggggaatgcyggctatgtca

SEQ ID NO: 39159 - DNA, 21 bp, Homo sapiens
gtcagaccaaycttggaattt

SEQ ID NO: 39160 - DNA, 21 bp, Homo sapiens
atatagtgtcyaaaaccttct

SEQ ID NO: 39161 - DNA, 21 bp, Homo sapiens
ccactggcaakggagatacat

SEQ ID NO: 39162 - DNA, 21 bp, Homo sapiens
gagatttagcmgtttcagaaa

SEQ ID NO: 39163 - DNA, 21 bp, Homo sapiens
cctttaacccrtttcccatat

SEQ ID NO: 39164 - DNA, 21 bp, Homo sapiens
atagtggttaygtatttttat

SEQ ID NO: 39165 - DNA, 21 bp, Homo sapiens
tctaaatggcmtactattgtt

SEQ ID NO: 39166 - DNA, 21 bp, Homo sapiens
ctatttgccaraaatggtgtc

SEQ ID NO: 39167 - DNA, 21 bp, Homo sapiens
tgatagtgggrgagtacagtc

SEQ ID NO: 39168 - DNA, 21 bp, Homo sapiens
cttttccttcygaatttcctt

SEQ ID NO: 39169 - DNA, 21 bp, Homo sapiens
actcctttggyactagggcca

SEQ ID NO: 39170 - DNA, 21 bp, Homo sapiens
atccagtaacrcagattttta

SEQ ID NO: 39171 - DNA, 21 bp, Homo sapiens
tttgaggaagrttttcattgt

SEQ ID NO: 39172 - DNA, 21 bp, Homo sapiens
ccattcatatktggggtaaaa

SEQ ID NO: 39173 - DNA, 21 bp, Homo sapiens
aatcaatcgcraacaaatgtt

SEQ ID NO: 39174 - DNA, 21 bp, Homo sapiens
atatgtgggayggagaatttc

SEQ ID NO: 39175 - DNA, 21 bp, Homo sapiens
tgtatggaaayggtttgatgc

SEQ ID NO: 39176 - DNA, 21 bp, Homo sapiens
tcttttagttkctgagcttaa

SEQ ID NO: 39177 - DNA, 21 bp, Homo sapiens
ataaaagaacktggctgctct

SEQ ID NO: 39178 - DNA, 21 bp, Homo sapiens
ttaccctatgyggcttattac

SEQ ID NO: 39179 - DNA, 21 bp, Homo sapiens
ctggagaatawctagcattga

SEQ ID NO: 39180 - DNA, 21 bp, Homo sapiens
tctattgagtracttctgtac

SEQ ID NO: 39181 - DNA, 21 bp, Homo sapiens
tataactagcrtgtcttatgg

SEQ ID NO: 39182 - DNA, 21 bp, Homo sapiens
cttaggtggcmatccgtggtc

SEQ ID NO: 39183 - DNA, 21 bp, Homo sapiens
aacagctcatygcccatctga

SEQ ID NO: 39184 - DNA, 21 bp, Homo sapiens
atacaaataamcctggcaaag

SEQ ID NO: 39185 - DNA, 21 bp, Homo sapiens
cactcccatamcctggattca

SEQ ID NO: 39186 - DNA, 21 bp, Homo sapiens
cttgtgaggartatacggtca

SEQ ID NO: 39187 - DNA, 21 bp, Homo sapiens
gaatccgcctstcacaagggc

SEQ ID NO: 39188 - DNA, 21 bp, Homo sapiens
gggaagtaagmaagagtaacg

SEQ ID NO: 39189 - DNA, 21 bp, Homo sapiens
atgaaagatgrctccagaaac

SEQ ID NO: 39190 - DNA, 21 bp, Homo sapiens
ttttaccagarggacctttct

SEQ ID NO: 39191 - DNA, 21 bp, Homo sapiens
tagatctttcyttgaagccat

SEQ ID NO: 39192 - DNA, 21 bp, Homo sapiens
tagtacacaargtaagataac

SEQ ID NO: 39193 - DNA, 21 bp, Homo sapiens
agtcctattcrcagatcctgc

SEQ ID NO: 39194 - DNA, 21 bp, Homo sapiens
atcccctttgycctttcagga

SEQ ID NO: 39195 - DNA, 21 bp, Homo sapiens
caactcttttytgccaaattc

SEQ ID NO: 39196 - DNA, 21 bp, Homo sapiens
tgggctgttcyctttgcctgg

SEQ ID NO: 39197 - DNA, 21 bp, Homo sapiens
aataaacacartgaagtacag

SEQ ID NO: 39198 - DNA, 21 bp, Homo sapiens
gagtttttttwaatatattga

SEQ ID NO: 39199 - DNA, 21 bp, Homo sapiens
gccggcgagcmggttctaccc

SEQ ID NO: 39200 - DNA, 21 bp, Homo sapiens
agaagcatcaygttgctaaca

SEQ ID NO: 39201 - DNA, 21 bp, Homo sapiens
atatatccagytgtaaatagc

SEQ ID NO: 39202 - DNA, 21 bp, Homo sapiens
ttctgcttccratgtgccatt

SEQ ID NO: 39203 - DNA, 21 bp, Homo sapiens
ggcagtttgaygtatagattt

SEQ ID NO: 39204 - DNA, 21 bp, Homo sapiens
cccttaatttkgatctattat

SEQ ID NO: 39205 - DNA, 21 bp, Homo sapiens
ctcaaaaacckctttaggata

SEQ ID NO: 39206 - DNA, 21 bp, Homo sapiens
aaagaaaagarcttctgggca

SEQ ID NO: 39207 - DNA, 21 bp, Homo sapiens
tattcgtaagkctgctgaaat

SEQ ID NO: 39208 - DNA, 21 bp, Homo sapiens
tactgtagccyattgatatgg

SEQ ID NO: 39209 - DNA, 21 bp, Homo sapiens
tctatgacaasgtactcttct

SEQ ID NO: 39210 - DNA, 21 bp, Homo sapiens
agtttctcatsatgaccagca

SEQ ID NO: 39211 - DNA, 21 bp, Homo sapiens
gaggtaaaaayataagcttgg

SEQ ID NO: 39212 - DNA, 21 bp, Homo sapiens
cactctccctyaggttcacct

SEQ ID NO: 39213 - DNA, 21 bp, Homo sapiens
atatctggccragagggatga

SEQ ID NO: 39214 - DNA, 21 bp, Homo sapiens
ctagtcgggcygcacatctgt

SEQ ID NO: 39215 - DNA, 21 bp, Homo sapiens
tcatggctctycaaaaaagac

SEQ ID NO: 39216 - DNA, 21 bp, Homo sapiens
ctcctggaaaraatctcgaga

SEQ ID NO: 39217 - DNA, 21 bp, Homo sapiens
gttttgtggaygtggaagtag

SEQ ID NO: 39218 - DNA, 21 bp, Homo sapiens
tcatttgacarcactcatgtt

SEQ ID NO: 39219 - DNA, 21 bp, Homo sapiens
ctctccattaytgacctccta

SEQ ID NO: 39220 - DNA, 21 bp, Homo sapiens
gaaaaggaaarctcatcgatg

SEQ ID NO: 39221 - DNA, 21 bp, Homo sapiens
taggaagtttmaagcctgctt

SEQ ID NO: 39222 - DNA, 21 bp, Homo sapiens
tcggtgtggtyacaagagcat

SEQ ID NO: 39223 - DNA, 21 bp, Homo sapiens
aagctacaccrtatgcaaggc

SEQ ID NO: 39224 - DNA, 21 bp, Homo sapiens
cttattctcaytggcaaggca

SEQ ID NO: 39225 - DNA, 21 bp, Homo sapiens
gagaaatctaycaaacaacat

SEQ ID NO: 39226 - DNA, 21 bp, Homo sapiens
tcaaagaggcrttaagtacag

SEQ ID NO: 39227 - DNA, 21 bp, Homo sapiens
tgtaaaggaartgccctccct

SEQ ID NO: 39228 - DNA, 21 bp, Homo sapiens
agggagcaatsttcccctctc

SEQ ID NO: 39229 - DNA, 21 bp, Homo sapiens
gggtaaccatrccccagctcc

SEQ ID NO: 39230 - DNA, 21 bp, Homo sapiens
actccctttgkcttgggtttt

SEQ ID NO: 39231 - DNA, 21 bp, Homo sapiens
atttatagctmaacatagaat

SEQ ID NO: 39232 - DNA, 21 bp, Homo sapiens
ccgaggtggaycatcctgact

SEQ ID NO: 39233 - DNA, 21 bp, Homo sapiens
atcttttctcmgtgagattat

SEQ ID NO: 39234 - DNA, 21 bp, Homo sapiens
ggtccccagcmctgaaagcct

SEQ ID NO: 39235 - DNA, 21 bp, Homo sapiens
atgaaacccaragtgcctcct

SEQ ID NO: 39236 - DNA, 21 bp, Homo sapiens
aatgcaaatgyctgcttctac

SEQ ID NO: 39237 - DNA, 21 bp, Homo sapiens
attcctctaasatacctctgc

SEQ ID NO: 39238 - DNA, 21 bp, Homo sapiens
aggaatttggrtcctttgcaa

SEQ ID NO: 39239 - DNA, 21 bp, Homo sapiens
atgggcttctratgcttaagg

SEQ ID NO: 39240 - DNA, 21 bp, Homo sapiens
aattcctcggmgggcaccaga

SEQ ID NO: 39241 - DNA, 21 bp, Homo sapiens
ctgattgggcmtccctgggtg

SEQ ID NO: 39242 - DNA, 21 bp, Homo sapiens
gttcctcacartgagttttgt

SEQ ID NO: 39243 - DNA, 21 bp, Homo sapiens
gctttgtaacrccttacacta

SEQ ID NO: 39244 - DNA, 21 bp, Homo sapiens
acttgaaattragctgagttc

SEQ ID NO: 39245 - DNA, 21 bp, Homo sapiens
tcctgaaaccktaacacaatg

SEQ ID NO: 39246 - DNA, 21 bp, Homo sapiens
gatctgctccmgcaagaagga

SEQ ID NO: 39247 - DNA, 21 bp, Homo sapiens
tggtgaatcayacatgactct

SEQ ID NO: 39248 - DNA, 21 bp, Homo sapiens
gaggtctgcaygtgacaagtg

SEQ ID NO: 39249 - DNA, 21 bp, Homo sapiens
aaaatgatttmccgtttacta

SEQ ID NO: 39250 - DNA, 21 bp, Homo sapiens
ccaggaaataycagcacacca

SEQ ID NO: 39251 - DNA, 21 bp, Homo sapiens
gtgacctaccrgggaggtaga

SEQ ID NO: 39252 - DNA, 21 bp, Homo sapiens
taccatagttkacggaacaga

SEQ ID NO: 39253 - DNA, 21 bp, Homo sapiens
cacaaggcatyggaagcttct

SEQ ID NO: 39254 - DNA, 21 bp, Homo sapiens
caaggagttcratcccacaag

SEQ ID NO: 39255 - DNA, 21 bp, Homo sapiens
tgcaagattgyagatatagac

SEQ ID NO: 39256 - DNA, 21 bp, Homo sapiens
tgaggcaaccmagttgaatgg

SEQ ID NO: 39257 - DNA, 21 bp, Homo sapiens
gtgtcacctcraagcatttaa

SEQ ID NO: 39258 - DNA, 21 bp, Homo sapiens
ctgcaggtgcmtgtcactaag

SEQ ID NO: 39259 - DNA, 21 bp, Homo sapiens
ggcaatctctscttttttttt

SEQ ID NO: 39260 - DNA, 21 bp, Homo sapiens
gagtgccctgrcatggtaggt

SEQ ID NO: 39261 - DNA, 21 bp, Homo sapiens
cacaggcttcragtccagggt

SEQ ID NO: 39262 - DNA, 21 bp, Homo sapiens
gcgcggtgctraaggacatca

SEQ ID NO: 39263 - DNA, 21 bp, Homo sapiens
gcgcgtgtccrctcaccctgt

SEQ ID NO: 39264 - DNA, 21 bp, Homo sapiens
tgggtgggacrggcaacgggc

SEQ ID NO: 39265 - DNA, 21 bp, Homo sapiens
ctttccaacckgctttgtggc

SEQ ID NO: 39266 - DNA, 21 bp, Homo sapiens
tggccccagcygggtggagac

SEQ ID NO: 39267 - DNA, 21 bp, Homo sapiens
cgatccagcaygagccccacg

SEQ ID NO: 39268 - DNA, 21 bp, Homo sapiens
gatgcctgcakatcagctaaa

SEQ ID NO: 39269 - DNA, 21 bp, Homo sapiens
aagcttccaarttgctgagac

SEQ ID NO: 39270 - DNA, 21 bp, Homo sapiens
ccaatggatayaaaactcagg

SEQ ID NO: 39271 - DNA, 21 bp, Homo sapiens
gtaccaaactycttttttaat

SEQ ID NO: 39272 - DNA, 21 bp, Homo sapiens
accccatgtgmaagaggccca

SEQ ID NO: 39273 - DNA, 21 bp, Homo sapiens
acctgaaatartcatcttatc

SEQ ID NO: 39274 - DNA, 21 bp, Homo sapiens
acagagatagsgagataggtg

SEQ ID NO: 39275 - DNA, 21 bp, Homo sapiens
atgtagatcartttgtcctat

SEQ ID NO: 39276 - DNA, 21 bp, Homo sapiens
tgcagtattgyttaaccctga

SEQ ID NO: 39277 - DNA, 21 bp, Homo sapiens
cctcattgacwcaactttatt

SEQ ID NO: 39278 - DNA, 21 bp, Homo sapiens
taaagtcattytggatagaaa

SEQ ID NO: 39279 - DNA, 21 bp, Homo sapiens
caatcatcaawggatcagtat

SEQ ID NO: 39280 - DNA, 21 bp, Homo sapiens
taggaaaagascttgggcctc

SEQ ID NO: 39281 - DNA, 21 bp, Homo sapiens
gagcttcatcrtcttgccaaa

SEQ ID NO: 39282 - DNA, 21 bp, Homo sapiens
cgtactataayagcacaaggg

SEQ ID NO: 39283 - DNA, 21 bp, Homo sapiens
caaacaccgarggctattgag

SEQ ID NO: 39284 - DNA, 21 bp, Homo sapiens
acatccttgcrggtagaacta

SEQ ID NO: 39285 - DNA, 21 bp, Homo sapiens
atttgttacastgccaatata

SEQ ID NO: 39286 - DNA, 21 bp, Homo sapiens
gttacctctayaagccttttg

SEQ ID NO: 39287 - DNA, 21 bp, Homo sapiens
tgggacaggtkaccccattca

SEQ ID NO: 39288 - DNA, 21 bp, Homo sapiens
tttcaacgcayttgaagaggc

SEQ ID NO: 39289 - DNA, 21 bp, Homo sapiens
ggtgttcaaasggcaacatgc

SEQ ID NO: 39290 - DNA, 21 bp, Homo sapiens
gaactactctycttcagtatt

SEQ ID NO: 39291 - DNA, 21 bp, Homo sapiens
ctccgcctaamgcacccttct

SEQ ID NO: 39292 - DNA, 21 bp, Homo sapiens
acggtgaacaygtggtttttc

SEQ ID NO: 39293 - DNA, 21 bp, Homo sapiens
ttaggccagakggagggtcca

SEQ ID NO: 39294 - DNA, 21 bp, Homo sapiens
ataacaactaycccagtctag

SEQ ID NO: 39295 - DNA, 21 bp, Homo sapiens
caaactagaayatgccccaga

SEQ ID NO: 39296 - DNA, 21 bp, Homo sapiens
ctccccacttyagtataaatt

SEQ ID NO: 39297 - DNA, 21 bp, Homo sapiens
cacgcctgggygcacgatcaa

SEQ ID NO: 39298 - DNA, 21 bp, Homo sapiens
tataaagctgsttgtttcagc

SEQ ID NO: 39299 - DNA, 21 bp, Homo sapiens
tctgccggatrttcttacccc

SEQ ID NO: 39300 - DNA, 21 bp, Homo sapiens
ggttccatccrcatgttgatg

SEQ ID NO: 39301 - DNA, 21 bp, Homo sapiens
tggcagccagygtctgcaagc

SEQ ID NO: 39302 - DNA, 21 bp, Homo sapiens
gagatgactcstgctatggaa

SEQ ID NO: 39303 - DNA, 21 bp, Homo sapiens
ttcacattccraagagctggg

SEQ ID NO: 39304 - DNA, 21 bp, Homo sapiens
gcatttatctygcagcgtgcg

SEQ ID NO: 39305 - DNA, 21 bp, Homo sapiens
gcagaaataaygattttggag

SEQ ID NO: 39306 - DNA, 21 bp, Homo sapiens
ccagaaaaagyttccaacctc

SEQ ID NO: 39307 - DNA, 21 bp, Homo sapiens
cagttctctgyggcctgtcct

SEQ ID NO: 39308 - DNA, 21 bp, Homo sapiens
ttctttctgaygccaaactcc

SEQ ID NO: 39309 - DNA, 21 bp, Homo sapiens
aaagattatawccatttaagc

SEQ ID NO: 39310 - DNA, 21 bp, Homo sapiens
gtgttgttgcyggattttcat

SEQ ID NO: 39311 - DNA, 21 bp, Homo sapiens
tcactcatgcrcaatgtaagc

SEQ ID NO: 39312 - DNA, 21 bp, Homo sapiens
gctcctggcakgagaaaggca

SEQ ID NO: 39313 - DNA, 21 bp, Homo sapiens
cttgggtggaratagtcaaaa

SEQ ID NO: 39314 - DNA, 21 bp, Homo sapiens
tagatatagaygacatgtaaa

SEQ ID NO: 39315 - DNA, 21 bp, Homo sapiens
gctctgcaagragaaattgtt

SEQ ID NO: 39316 - DNA, 21 bp, Homo sapiens
cagtggaaagyttagttccct

SEQ ID NO: 39317 - DNA, 21 bp, Homo sapiens
gagaaaatccrtcaagttgac

SEQ ID NO: 39318 - DNA, 21 bp, Homo sapiens
aggatgtatamagaagaatgt

SEQ ID NO: 39319 - DNA, 21 bp, Homo sapiens
atatgatcgcytgcttcctcc

SEQ ID NO: 39320 - DNA, 21 bp, Homo sapiens
aatgatttacrttcagattac

SEQ ID NO: 39321 - DNA, 21 bp, Homo sapiens
ttggtttacaygggctctaga

SEQ ID NO: 39322 - DNA, 21 bp, Homo sapiens
cttcagtgctyagccaggcca

SEQ ID NO: 39323 - DNA, 21 bp, Homo sapiens
atttcaaactkagattaggtg

SEQ ID NO: 39324 - DNA, 21 bp, Homo sapiens
tctaaccaacmtgacattgct

SEQ ID NO: 39325 - DNA, 21 bp, Homo sapiens
atacatgtacwcacagtgtat

SEQ ID NO: 39326 - DNA, 21 bp, Homo sapiens
ttcatacaccsagcgtggatt

SEQ ID NO: 39327 - DNA, 21 bp, Homo sapiens
tttcacacaasaataaagaga

SEQ ID NO: 39328 - DNA, 21 bp, Homo sapiens
gaatatctgartgactagatg

SEQ ID NO: 39329 - DNA, 21 bp, Homo sapiens
taggtcaagargccagtgctg

SEQ ID NO: 39330 - DNA, 21 bp, Homo sapiens
tttttcacagsaatagtactt

SEQ ID NO: 39331 - DNA, 21 bp, Homo sapiens
tggaaattacyttggtactgg

SEQ ID NO: 39332 - DNA, 21 bp, Homo sapiens
attcgtgtagratagcaagga

SEQ ID NO: 39333 - DNA, 21 bp, Homo sapiens
acacatgcacwgtttaaatga

SEQ ID NO: 39334 - DNA, 21 bp, Homo sapiens
tcacaaggctrtgctcgctgt

SEQ ID NO: 39335 - DNA, 21 bp, Homo sapiens
ccaagctattraagtcttatt

SEQ ID NO: 39336 - DNA, 21 bp, Homo sapiens
gcacagtctaygctaggagct

SEQ ID NO: 39337 - DNA, 21 bp, Homo sapiens
actgattattyagcaagtcac

SEQ ID NO: 39338 - DNA, 21 bp, Homo sapiens
ctggtatcttygccccaaatc

SEQ ID NO: 39339 - DNA, 21 bp, Homo sapiens
tcccgcgtatytttcactgtg

SEQ ID NO: 39340 - DNA, 21 bp, Homo sapiens
ttcccggcacscttctccccc

SEQ ID NO: 39341 - DNA, 21 bp, Homo sapiens
gctgctgcctrgcccctgtaa

SEQ ID NO: 39342 - DNA, 21 bp, Homo sapiens
ccaccatggcrgggtggaggc

SEQ ID NO: 39343 - DNA, 21 bp, Homo sapiens
tcctctgtccktcttagagtc

SEQ ID NO: 39344 - DNA, 21 bp, Homo sapiens
aagcatacctrtgaaccagca

SEQ ID NO: 39345 - DNA, 21 bp, Homo sapiens
gaagctgtacygttaagtgaa

SEQ ID NO: 39346 - DNA, 21 bp, Homo sapiens
agcccagcagscttgaacgcc

SEQ ID NO: 39347 - DNA, 21 bp, Homo sapiens
ctctcttctcygggggttatc

SEQ ID NO: 39348 - DNA, 21 bp, Homo sapiens
ctctaagaaayaaaaaaggaa

SEQ ID NO: 39349 - DNA, 21 bp, Homo sapiens
agacatgtacrccaactgcac

SEQ ID NO: 39350 - DNA, 21 bp, Homo sapiens
tgttggtgttsttgctgtttt

SEQ ID NO: 39351 - DNA, 21 bp, Homo sapiens
tttctggaccragctttcagg

SEQ ID NO: 39352 - DNA, 21 bp, Homo sapiens
catataacacwctcagaaatt

SEQ ID NO: 39353 - DNA, 21 bp, Homo sapiens
aatgaaatatrttactaaatt

SEQ ID NO: 39354 - DNA, 21 bp, Homo sapiens
gctgttgtctscccccgggga

SEQ ID NO: 39355 - DNA, 21 bp, Homo sapiens
ctgctggaccrggtgttgtgg

SEQ ID NO: 39356 - DNA, 21 bp, Homo sapiens
ctcgtaagcamgcctttactt

SEQ ID NO: 39357 - DNA, 21 bp, Homo sapiens
aagattttgaratggtgaaaa

SEQ ID NO: 39358 - DNA, 21 bp, Homo sapiens
gggcttccccrgcgccctgcg

SEQ ID NO: 39359 - DNA, 21 bp, Homo sapiens
ttgttcctggyatgtcccctg

SEQ ID NO: 39360 - DNA, 21 bp, Homo sapiens
tccttgtcacytctgcagcct

SEQ ID NO: 39361 - DNA, 21 bp, Homo sapiens
aatagactacrgggaatcggc

SEQ ID NO: 39362 - DNA, 21 bp, Homo sapiens
agcatatgcayggggtatcag

SEQ ID NO: 39363 - DNA, 21 bp, Homo sapiens
gaagcacgagyacacacccac

SEQ ID NO: 39364 - DNA, 21 bp, Homo sapiens
tgatgaatcaygtgtaccggg

SEQ ID NO: 39365 - DNA, 21 bp, Homo sapiens
taaacactaasacaactacga

SEQ ID NO: 39366 - DNA, 21 bp, Homo sapiens
ataacctatgmccatacattt

SEQ ID NO: 39367 - DNA, 21 bp, Homo sapiens
gagtatgacayggtgggttga

SEQ ID NO: 39368 - DNA, 21 bp, Homo sapiens
accaaaaaaaraggggacttg

SEQ ID NO: 39369 - DNA, 21 bp, Homo sapiens
ggtacgggggrtattaatgcc

SEQ ID NO: 39370 - DNA, 21 bp, Homo sapiens
ctggttctccwatttccaagt

SEQ ID NO: 39371 - DNA, 21 bp, Homo sapiens
acacaagtggycaagggcaat

SEQ ID NO: 39372 - DNA, 21 bp, Homo sapiens
caggtgctaamactacaccca

SEQ ID NO: 39373 - DNA, 21 bp, Homo sapiens
accacacactstttcctccag

SEQ ID NO: 39374 - DNA, 21 bp, Homo sapiens
tcagaagacayggctgttccc

SEQ ID NO: 39375 - DNA, 21 bp, Homo sapiens
aaaaggctgasacttgggtaa

SEQ ID NO: 39376 - DNA, 21 bp, Homo sapiens
caataaaatgygtctcttttt

SEQ ID NO: 39377 - DNA, 21 bp, Homo sapiens
ctctgaaaatrgggttaacaa

SEQ ID NO: 39378 - DNA, 21 bp, Homo sapiens
tcgggtagcawaaagtctgag

SEQ ID NO: 39379 - DNA, 21 bp, Homo sapiens
agccaaaggtrttacgcgtgg

SEQ ID NO: 39380 - DNA, 21 bp, Homo sapiens
cttctatcctycacttcttta

SEQ ID NO: 39381 - DNA, 21 bp, Homo sapiens
cagcttgccayagcaattatc

SEQ ID NO: 39382 - DNA, 21 bp, Homo sapiens
ttcgcaccatyactgtatttg

SEQ ID NO: 39383 - DNA, 21 bp, Homo sapiens
aaaactacctrcaatatggaa

SEQ ID NO: 39384 - DNA, 21 bp, Homo sapiens
cccgagacackggcaaaaaag

SEQ ID NO: 39385 - DNA, 21 bp, Homo sapiens
ttttaaaaccygtttgccatt

SEQ ID NO: 39386 - DNA, 21 bp, Homo sapiens
gtgggctgtaytgggagtcgg

SEQ ID NO: 39387 - DNA, 21 bp, Homo sapiens
ttctcagcatyagacacagta

SEQ ID NO: 39388 - DNA, 21 bp, Homo sapiens
ataataaatgkgctctctcag

SEQ ID NO: 39389 - DNA, 21 bp, Homo sapiens
actcagccagygtgagcaggg

SEQ ID NO: 39390 - DNA, 21 bp, Homo sapiens
cttgaggaggrcacgggactt

SEQ ID NO: 39391 - DNA, 21 bp, Homo sapiens
ccatggattaygagattagtt

SEQ ID NO: 39392 - DNA, 21 bp, Homo sapiens
tgctgcattayaaaccccaaa

SEQ ID NO: 39393 - DNA, 21 bp, Homo sapiens
aaaaattgtayacacttcttc

SEQ ID NO: 39394 - DNA, 21 bp, Homo sapiens
caagtcccaastcctaaggaa

SEQ ID NO: 39395 - DNA, 21 bp, Homo sapiens
ggagagcccaytataaaacag

SEQ ID NO: 39396 - DNA, 21 bp, Homo sapiens
gtaaaaagcasaaatagcttt

SEQ ID NO: 39397 - DNA, 21 bp, Homo sapiens
aatccctggtytatactaaat

SEQ ID NO: 39398 - DNA, 21 bp, Homo sapiens
gctcaataaakgttctcaaaa

SEQ ID NO: 39399 - DNA, 21 bp, Homo sapiens
caaatgacacrtctcttatga

SEQ ID NO: 39400 - DNA, 21 bp, Homo sapiens
agatgttcagyattatagaat

SEQ ID NO: 39401 - DNA, 21 bp, Homo sapiens
acaggatagtygttccctgtg

SEQ ID NO: 39402 - DNA, 21 bp, Homo sapiens
cattagcttayagaaatgtcc

SEQ ID NO: 39403 - DNA, 21 bp, Homo sapiens
ccattctcctmacctaaaatc

SEQ ID NO: 39404 - DNA, 21 bp, Homo sapiens
tggaaaaatgmatcgactggg

SEQ ID NO: 39405 - DNA, 21 bp, Homo sapiens
tatcaagttcmgaagttttcc

SEQ ID NO: 39406 - DNA, 21 bp, Homo sapiens
atccctatgcrttacggaaaa

SEQ ID NO: 39407 - DNA, 21 bp, Homo sapiens
ttggtctccaycatacatttc

SEQ ID NO: 39408 - DNA, 21 bp, Homo sapiens
tgtttattgargacttactag

SEQ ID NO: 39409 - DNA, 21 bp, Homo sapiens
caagactcagrcaataatata

SEQ ID NO: 39410 - DNA, 21 bp, Homo sapiens
tagtgctggaygtgcgagagg

SEQ ID NO: 39411 - DNA, 21 bp, Homo sapiens
atgtaaaggarccaataattt

SEQ ID NO: 39412 - DNA, 21 bp, Homo sapiens
atgagaaattyacaccttaag

SEQ ID NO: 39413 - DNA, 21 bp, Homo sapiens
atttattcttsctgcattatc

SEQ ID NO: 39414 - DNA, 21 bp, Homo sapiens
atcttgtctcycagttctggc

SEQ ID NO: 39415 - DNA, 21 bp, Homo sapiens
gtaaacattgyattcagggcc

SEQ ID NO: 39416 - DNA, 21 bp, Homo sapiens
aattatggatktttgtttaat

SEQ ID NO: 39417 - DNA, 21 bp, Homo sapiens
ttccgcattayaatctaaaga

SEQ ID NO: 39418 - DNA, 21 bp, Homo sapiens
acaggactgargaagaaagaa

SEQ ID NO: 39419 - DNA, 21 bp, Homo sapiens
agcctgtgaayagcaggtgct

SEQ ID NO: 39420 - DNA, 21 bp, Homo sapiens
cacttatctcytgtgtttagg

SEQ ID NO: 39421 - DNA, 21 bp, Homo sapiens
cgtttgatgarctaataaact

SEQ ID NO: 39422 - DNA, 21 bp, Homo sapiens
agtcttcagcrgcattggagt

SEQ ID NO: 39423 - DNA, 21 bp, Homo sapiens
ctataaaaacyaggtctcggt

SEQ ID NO: 39424 - DNA, 21 bp, Homo sapiens
tcgtgtccctrtgctagtcag

SEQ ID NO: 39425 - DNA, 21 bp, Homo sapiens
tagtgatgccwtgctttatct

SEQ ID NO: 39426 - DNA, 21 bp, Homo sapiens
aataataaaarctcatcaaaa

SEQ ID NO: 39427 - DNA, 21 bp, Homo sapiens
aaatttgaaastaaccctgtg

SEQ ID NO: 39428 - DNA, 21 bp, Homo sapiens
tttcaaacackagaattatag

SEQ ID NO: 39429 - DNA, 21 bp, Homo sapiens
acgggaagggrcggaaagaaa

SEQ ID NO: 39430 - DNA, 21 bp, Homo sapiens
attttaaaaayccatcacaga

SEQ ID NO: 39431 - DNA, 21 bp, Homo sapiens
cggtagttaayaattgcctta

SEQ ID NO: 39432 - DNA, 21 bp, Homo sapiens
agaagaaaaamcacctgctga

SEQ ID NO: 39433 - DNA, 21 bp, Homo sapiens
aaaagtccttwctgggaagca

SEQ ID NO: 39434 - DNA, 21 bp, Homo sapiens
tgaacatgtckgtaaatactg

SEQ ID NO: 39435 - DNA, 21 bp, Homo sapiens
gaaaaaaacaygctgaagcag

SEQ ID NO: 39436 - DNA, 21 bp, Homo sapiens
aacgaatccargccccaccag

SEQ ID NO: 39437 - DNA, 21 bp, Homo sapiens
aatgtgaccarcatggtggca

SEQ ID NO: 39438 - DNA, 21 bp, Homo sapiens
taagtattggraactgctgaa

SEQ ID NO: 39439 - DNA, 21 bp, Homo sapiens
cttgactcatstgggcttcag

SEQ ID NO: 39440 - DNA, 21 bp, Homo sapiens
accttggacckgtgtgaacac

SEQ ID NO: 39441 - DNA, 21 bp, Homo sapiens
aattgagcccygagggatgag

SEQ ID NO: 39442 - DNA, 21 bp, Homo sapiens
attttggcctrtttatttctc

SEQ ID NO: 39443 - DNA, 21 bp, Homo sapiens
gggtctaaggygctggtgtac

SEQ ID NO: 39444 - DNA, 21 bp, Homo sapiens
cttgtatcaayggaaaaattt

SEQ ID NO: 39445 - DNA, 21 bp, Homo sapiens
gaaactgctgygacctggagg

SEQ ID NO: 39446 - DNA, 21 bp, Homo sapiens
cattctgatcrgcctttgctt

SEQ ID NO: 39447 - DNA, 21 bp, Homo sapiens
agggttcaaaktttcctacat

SEQ ID NO: 39448 - DNA, 21 bp, Homo sapiens
ttgtgggaaaktcacctgagt

SEQ ID NO: 39449 - DNA, 21 bp, Homo sapiens
cagaagtcatracctctaaaa

SEQ ID NO: 39450 - DNA, 21 bp, Homo sapiens
cacgacagagrgctggaagta

SEQ ID NO: 39451 - DNA, 21 bp, Homo sapiens
aatggtcacayagaatgatag

SEQ ID NO: 39452 - DNA, 21 bp, Homo sapiens
ggaaatgtgtyccaggcaact

SEQ ID NO: 39453 - DNA, 21 bp, Homo sapiens
cctggggatcraagggacagg

SEQ ID NO: 39454 - DNA, 21 bp, Homo sapiens
aaggtcaagartttgggacca

SEQ ID NO: 39455 - DNA, 21 bp, Homo sapiens
gtcaggcttartacctaggca

SEQ ID NO: 39456 - DNA, 21 bp, Homo sapiens
gaatggactcmaaaggaatgg

SEQ ID NO: 39457 - DNA, 21 bp, Homo sapiens
ttctatctgtyctcttgctcc

SEQ ID NO: 39458 - DNA, 21 bp, Homo sapiens
acttgccatcytgaatggaag

SEQ ID NO: 39459 - DNA, 21 bp, Homo sapiens
acagtcaaatrcaagctggtg

SEQ ID NO: 39460 - DNA, 21 bp, Homo sapiens
tgcagggtacrattgtaactg

SEQ ID NO: 39461 - DNA, 21 bp, Homo sapiens
agcagatgagrgaagttttag

SEQ ID NO: 39462 - DNA, 21 bp, Homo sapiens
ttaaaacatgyagacttaacc

SEQ ID NO: 39463 - DNA, 21 bp, Homo sapiens
aacagataacrattggtctta

SEQ ID NO: 39464 - DNA, 21 bp, Homo sapiens
caccttccccragttcctgtt

SEQ ID NO: 39465 - DNA, 21 bp, Homo sapiens
aaatttccatyactagtttga

SEQ ID NO: 39466 - DNA, 21 bp, Homo sapiens
atttgatgatrtttaacctcc

SEQ ID NO: 39467 - DNA, 21 bp, Homo sapiens
ctgggaactgrcaggtgggag

SEQ ID NO: 39468 - DNA, 21 bp, Homo sapiens
aacgctatagrcctccataaa

SEQ ID NO: 39469 - DNA, 21 bp, Homo sapiens
gctggtgaatsataaactgtg

SEQ ID NO: 39470 - DNA, 21 bp, Homo sapiens
tcccactgccraatataccct

SEQ ID NO: 39471 - DNA, 21 bp, Homo sapiens
ttaaatttgarcagctcgaag

SEQ ID NO: 39472 - DNA, 21 bp, Homo sapiens
acaagttggtratttaaatga

SEQ ID NO: 39473 - DNA, 21 bp, Homo sapiens
aagtcatcttygaaccataat

SEQ ID NO: 39474 - DNA, 21 bp, Homo sapiens
tcaggtactaytccttcatat

SEQ ID NO: 39475 - DNA, 21 bp, Homo sapiens
ctgattatggrtaactgggca

SEQ ID NO: 39476 - DNA, 21 bp, Homo sapiens
tctttcacttrtttatgatgt

SEQ ID NO: 39477 - DNA, 21 bp, Homo sapiens
atagaagtttrtttaagatga

SEQ ID NO: 39478 - DNA, 21 bp, Homo sapiens
cattatttaarctttgctctt

SEQ ID NO: 39479 - DNA, 21 bp, Homo sapiens
catcatcgaartgttgtatta

SEQ ID NO: 39480 - DNA, 21 bp, Homo sapiens
gccttgttgartccacatgga

SEQ ID NO: 39481 - DNA, 21 bp, Homo sapiens
cttccaggctygtggtagtcc

SEQ ID NO: 39482 - DNA, 21 bp, Homo sapiens
ttggtttgcayagctagaaag

SEQ ID NO: 39483 - DNA, 21 bp, Homo sapiens
caacttcaggragatgcccct

SEQ ID NO: 39484 - DNA, 21 bp, Homo sapiens
ctgtatgttaytagtccagag

SEQ ID NO: 39485 - DNA, 21 bp, Homo sapiens
atttacagagstgcatttttt

SEQ ID NO: 39486 - DNA, 21 bp, Homo sapiens
actcatagtgrgacctgcact

SEQ ID NO: 39487 - DNA, 21 bp, Homo sapiens
attctttaaasaaggcacaat

SEQ ID NO: 39488 - DNA, 21 bp, Homo sapiens
gccctctagcyaggcctcgcg

SEQ ID NO: 39489 - DNA, 21 bp, Homo sapiens
tgaatgcaggwcaatcccact

SEQ ID NO: 39490 - DNA, 21 bp, Homo sapiens
ccatgtgccastctctcgatg

SEQ ID NO: 39491 - DNA, 21 bp, Homo sapiens
aatgcatcacrttgctggatt

SEQ ID NO: 39492 - DNA, 21 bp, Homo sapiens
ttttgaagaawtgttaatatc

SEQ ID NO: 39493 - DNA, 21 bp, Homo sapiens
atcttaatttkacatcccaat

SEQ ID NO: 39494 - DNA, 21 bp, Homo sapiens
cttatcctcaragtctcaaag

SEQ ID NO: 39495 - DNA, 21 bp, Homo sapiens
ttaaaaataarcattttggat

SEQ ID NO: 39496 - DNA, 21 bp, Homo sapiens
gctctctcccrgatacaagtc

SEQ ID NO: 39497 - DNA, 21 bp, Homo sapiens
aaattggatcrtaatataaaa

SEQ ID NO: 39498 - DNA, 21 bp, Homo sapiens
agttccaagartagaaagaag

SEQ ID NO: 39499 - DNA, 21 bp, Homo sapiens
tatgtgaaggrctgtgatgag

SEQ ID NO: 39500 - DNA, 21 bp, Homo sapiens
cacttgcatgytgttgacaac

SEQ ID NO: 39501 - DNA, 21 bp, Homo sapiens
aaagccacttygctctaagga

SEQ ID NO: 39502 - DNA, 21 bp, Homo sapiens
agcttgctatyatcttgatct

SEQ ID NO: 39503 - DNA, 21 bp, Homo sapiens
ccttagtcacrttcttcagtt

SEQ ID NO: 39504 - DNA, 21 bp, Homo sapiens
tgcacagtaakttattatatg

SEQ ID NO: 39505 - DNA, 21 bp, Homo sapiens
gaaagagttamaagactagtt

SEQ ID NO: 39506 - DNA, 21 bp, Homo sapiens
ttggccaaagrgaaatcaatc

SEQ ID NO: 39507 - DNA, 21 bp, Homo sapiens
tgggaggggtstacccaagat

SEQ ID NO: 39508 - DNA, 21 bp, Homo sapiens
cagtctttctygattaacatt

SEQ ID NO: 39509 - DNA, 21 bp, Homo sapiens
cgccttgagawgtggtggaga

SEQ ID NO: 39510 - DNA, 21 bp, Homo sapiens
tattgtactasgttaaataat

SEQ ID NO: 39511 - DNA, 21 bp, Homo sapiens
agcatctcaayttgaaaattt

SEQ ID NO: 39512 - DNA, 21 bp, Homo sapiens
taatcagtgamataaatgaca

SEQ ID NO: 39513 - DNA, 21 bp, Homo sapiens
gctaacaatcrttaaagagtc

SEQ ID NO: 39514 - DNA, 21 bp, Homo sapiens
atttcaaaccrttggaaaaat

SEQ ID NO: 39515 - DNA, 21 bp, Homo sapiens
tatcttggaayaaaggttaga

SEQ ID NO: 39516 - DNA, 21 bp, Homo sapiens
gtctactggaytcatcgtaca

SEQ ID NO: 39517 - DNA, 21 bp, Homo sapiens
tttcctagtgyttgacttact

SEQ ID NO: 39518 - DNA, 21 bp, Homo sapiens
atctcctgaaktttgaacaca

SEQ ID NO: 39519 - DNA, 21 bp, Homo sapiens
atgagactccmgatcctattt

SEQ ID NO: 39520 - DNA, 21 bp, Homo sapiens
tcactttatgycactatgctt

SEQ ID NO: 39521 - DNA, 21 bp, Homo sapiens
agtctctgtgyattgcatata

SEQ ID NO: 39522 - DNA, 21 bp, Homo sapiens
aaatgtaagtktgctgcaata

SEQ ID NO: 39523 - DNA, 21 bp, Homo sapiens
tatttccaagrgatacatgaa

SEQ ID NO: 39524 - DNA, 21 bp, Homo sapiens
tgtttgccttyttgctaatct

SEQ ID NO: 39525 - DNA, 21 bp, Homo sapiens
tcaagttatasctaaatatct

SEQ ID NO: 39526 - DNA, 21 bp, Homo sapiens
gctttgcacckctgcagacag

SEQ ID NO: 39527 - DNA, 21 bp, Homo sapiens
aatttatagamtgtaaaacta

SEQ ID NO: 39528 - DNA, 21 bp, Homo sapiens
gctgcaggacwcccctctcca

SEQ ID NO: 39529 - DNA, 21 bp, Homo sapiens
ataattggttytacagtgtac

SEQ ID NO: 39530 - DNA, 21 bp, Homo sapiens
accatacagtragttgggcag

SEQ ID NO: 39531 - DNA, 21 bp, Homo sapiens
gaaatggtcartcttttagag

SEQ ID NO: 39532 - DNA, 21 bp, Homo sapiens
ggatccaacayagcttgtggc

SEQ ID NO: 39533 - DNA, 21 bp, Homo sapiens
atttaaatgtrgacagaaaat

SEQ ID NO: 39534 - DNA, 21 bp, Homo sapiens
acaaagaggcrtggctgtgtt

SEQ ID NO: 39535 - DNA, 21 bp, Homo sapiens
gtgactggatrcagatcgagg

SEQ ID NO: 39536 - DNA, 21 bp, Homo sapiens
gttctgctttyaccaggtgta

SEQ ID NO: 39537 - DNA, 21 bp, Homo sapiens
atcttattcayctgtatctac

SEQ ID NO: 39538 - DNA, 21 bp, Homo sapiens
ttaggtccacyggttacttca

SEQ ID NO: 39539 - DNA, 21 bp, Homo sapiens
tatcctctttsacgctaagtg

SEQ ID NO: 39540 - DNA, 21 bp, Homo sapiens
aggcacgtttrtgctgcactc

SEQ ID NO: 39541 - DNA, 21 bp, Homo sapiens
cagagcatcargataggttaa

SEQ ID NO: 39542 - DNA, 21 bp, Homo sapiens
ggatagtccasatcacaagct

SEQ ID NO: 39543 - DNA, 21 bp, Homo sapiens
tccaccaaccrttctttgcct

SEQ ID NO: 39544 - DNA, 21 bp, Homo sapiens
gggatgctcayagagtgtctt

SEQ ID NO: 39545 - DNA, 21 bp, Homo sapiens
ttgtttggctmcacactgaag

SEQ ID NO: 39546 - DNA, 21 bp, Homo sapiens
aggcaacgccrcactggggac

SEQ ID NO: 39547 - DNA, 21 bp, Homo sapiens
gcaacttgtcmtctcagttcc

SEQ ID NO: 39548 - DNA, 21 bp, Homo sapiens
ccattattctratttgttaaa

SEQ ID NO: 39549 - DNA, 21 bp, Homo sapiens
tccaggcaggrtgcaagctgt

SEQ ID NO: 39550 - DNA, 21 bp, Homo sapiens
agtacctgcartaatgtaaaa

SEQ ID NO: 39551 - DNA, 21 bp, Homo sapiens
gaagttttatyatgttctgag

SEQ ID NO: 39552 - DNA, 21 bp, Homo sapiens
tgacaatccartcaagcccca

SEQ ID NO: 39553 - DNA, 21 bp, Homo sapiens
ttctatgtackttttgtgggg

SEQ ID NO: 39554 - DNA, 21 bp, Homo sapiens
ttctccatgtygtccccgttg

SEQ ID NO: 39555 - DNA, 21 bp, Homo sapiens
acatctgttgsaaggagcaaa

SEQ ID NO: 39556 - DNA, 21 bp, Homo sapiens
aatatactctmccgatgatga

SEQ ID NO: 39557 - DNA, 21 bp, Homo sapiens
attaaaaatarccaaacgata

SEQ ID NO: 39558 - DNA, 21 bp, Homo sapiens
cctgaattctstaatagtttc

SEQ ID NO: 39559 - DNA, 21 bp, Homo sapiens
ccttctttggyttttgttggt

SEQ ID NO: 39560 - DNA, 21 bp, Homo sapiens
attggcctgaygatttcctgc

SEQ ID NO: 39561 - DNA, 21 bp, Homo sapiens
gaatgctcccrccgcagcagg

SEQ ID NO: 39562 - DNA, 21 bp, Homo sapiens
ctgaaggaacytactgtccat

SEQ ID NO: 39563 - DNA, 21 bp, Homo sapiens
cctctctgtcsgaaaggatgc

SEQ ID NO: 39564 - DNA, 21 bp, Homo sapiens
accaaaaaccycgacttacga

SEQ ID NO: 39565 - DNA, 21 bp, Homo sapiens
ccaaggggtcracggtaaagc

SEQ ID NO: 39566 - DNA, 21 bp, Homo sapiens
agtaggactgycttgatggca

SEQ ID NO: 39567 - DNA, 21 bp, Homo sapiens
acagcgtgagrcccctgcatg

SEQ ID NO: 39568 - DNA, 21 bp, Homo sapiens
gatgacaatayccagcacctg

SEQ ID NO: 39569 - DNA, 21 bp, Homo sapiens
ccgagacacgmtggggagaga

SEQ ID NO: 39570 - DNA, 21 bp, Homo sapiens
gagtatgttaytaggaatttt

SEQ ID NO: 39571 - DNA, 21 bp, Homo sapiens
aagtcctgtcygggcaaagga

SEQ ID NO: 39572 - DNA, 21 bp, Homo sapiens
ctccaggcccractcaaagac

SEQ ID NO: 39573 - DNA, 21 bp, Homo sapiens
tgtgattaacwacgggtgacg

SEQ ID NO: 39574 - DNA, 21 bp, Homo sapiens
gctggtgaggktcatcctcca

SEQ ID NO: 39575 - DNA, 21 bp, Homo sapiens
gaacttactasggccaagaaa

SEQ ID NO: 39576 - DNA, 21 bp, Homo sapiens
tctgtgacctstctttcccct

SEQ ID NO: 39577 - DNA, 21 bp, Homo sapiens
cgggcagataygggccaattt

SEQ ID NO: 39578 - DNA, 21 bp, Homo sapiens
ttatatggagygcctttgaaa

SEQ ID NO: 39579 - DNA, 21 bp, Homo sapiens
tggtgaaggargcgatttcct

SEQ ID NO: 39580 - DNA, 21 bp, Homo sapiens
agggtaattgrgcaatggaca

SEQ ID NO: 39581 - DNA, 21 bp, Homo sapiens
ctgcatctttycatttttttg

SEQ ID NO: 39582 - DNA, 21 bp, Homo sapiens
ggaggatgacwtcttgcaaat

SEQ ID NO: 39583 - DNA, 21 bp, Homo sapiens
taaaacgtacrtaagggatat

SEQ ID NO: 39584 - DNA, 21 bp, Homo sapiens
aaaaatctgakggactgcaac

SEQ ID NO: 39585 - DNA, 21 bp, Homo sapiens
ttttaatcaaygggggtactt

SEQ ID NO: 39586 - DNA, 21 bp, Homo sapiens
aaaaagaaaarcattgccatt

SEQ ID NO: 39587 - DNA, 21 bp, Homo sapiens
ttctctccaartattccgtga

SEQ ID NO: 39588 - DNA, 21 bp, Homo sapiens
ctggatgtgcmtgagttggac

SEQ ID NO: 39589 - DNA, 21 bp, Homo sapiens
gtcattcatamcaaaagcgtc

SEQ ID NO: 39590 - DNA, 21 bp, Homo sapiens
taaaagatttrctgagacaca

SEQ ID NO: 39591 - DNA, 21 bp, Homo sapiens
tgcacactgawgatttatagt

SEQ ID NO: 39592 - DNA, 21 bp, Homo sapiens
gtttgacagtyctgtatccaa

SEQ ID NO: 39593 - DNA, 21 bp, Homo sapiens
ggaagcaagaygtgtcccatg

SEQ ID NO: 39594 - DNA, 21 bp, Homo sapiens
atgctctctcraggttgttat

SEQ ID NO: 39595 - DNA, 21 bp, Homo sapiens
ggcgaatagcygagtgatccc

SEQ ID NO: 39596 - DNA, 21 bp, Homo sapiens
tgaggtctcartccttggcaa

SEQ ID NO: 39597 - DNA, 21 bp, Homo sapiens
cttcccagtaytagcgctgga

SEQ ID NO: 39598 - DNA, 21 bp, Homo sapiens
ttagaaatgaygcaactactt

SEQ ID NO: 39599 - DNA, 21 bp, Homo sapiens
aatgtacgggrctgataaaaa

SEQ ID NO: 39600 - DNA, 21 bp, Homo sapiens
cagtggactaygggtcctttg

SEQ ID NO: 39601 - DNA, 21 bp, Homo sapiens
taaaattgacyggctatatat

SEQ ID NO: 39602 - DNA, 21 bp, Homo sapiens
gaaaagactaragatgactga

SEQ ID NO: 39603 - DNA, 21 bp, Homo sapiens
aaaatgcaacygtcatatgga

SEQ ID NO: 39604 - DNA, 21 bp, Homo sapiens
atttagaattkatccgtgaat

SEQ ID NO: 39605 - DNA, 21 bp, Homo sapiens
gaatttagtgycataaaacaa

SEQ ID NO: 39606 - DNA, 21 bp, Homo sapiens
caaatgggccrtgccagggag

SEQ ID NO: 39607 - DNA, 21 bp, Homo sapiens
catctaaaatrttgggttggt

SEQ ID NO: 39608 - DNA, 21 bp, Homo sapiens
atggggcttaratgtccaaac

SEQ ID NO: 39609 - DNA, 21 bp, Homo sapiens
acaattttgcwaccagaaaaa

SEQ ID NO: 39610 - DNA, 21 bp, Homo sapiens
cacaggagagkaaagtcatca

SEQ ID NO: 39611 - DNA, 21 bp, Homo sapiens
tgttacccaascaggctgaat

SEQ ID NO: 39612 - DNA, 21 bp, Homo sapiens
ttcgttagtarttcattagcc

SEQ ID NO: 39613 - DNA, 21 bp, Homo sapiens
atgccaaacaygtttaaatag

SEQ ID NO: 39614 - DNA, 21 bp, Homo sapiens
gcactggcttrtctattcttc

SEQ ID NO: 39615 - DNA, 21 bp, Homo sapiens
acaatcactamcacatggaat

SEQ ID NO: 39616 - DNA, 21 bp, Homo sapiens
tcagttctcaygggctcggca

SEQ ID NO: 39617 - DNA, 21 bp, Homo sapiens
ctttaatcatkcctgttgatc

SEQ ID NO: 39618 - DNA, 21 bp, Homo sapiens
gatacagtttyctagccaaga

SEQ ID NO: 39619 - DNA, 21 bp, Homo sapiens
tctctggttaytccctacatt

SEQ ID NO: 39620 - DNA, 21 bp, Homo sapiens
cactcagtgtrtatagatata

SEQ ID NO: 39621 - DNA, 21 bp, Homo sapiens
ttctgtaaggmaaaagtgtgc

SEQ ID NO: 39622 - DNA, 21 bp, Homo sapiens
ggaatgtttcyaaatgaagtc

SEQ ID NO: 39623 - DNA, 21 bp, Homo sapiens
cttcctctccmgggactaaag

SEQ ID NO: 39624 - DNA, 21 bp, Homo sapiens
aacagccttcraaagcagttg

SEQ ID NO: 39625 - DNA, 21 bp, Homo sapiens
aaagagtcatsagatcattgt

SEQ ID NO: 39626 - DNA, 21 bp, Homo sapiens
ataagtggaakgtcttggctc

SEQ ID NO: 39627 - DNA, 21 bp, Homo sapiens
catctggccamattcccctgg

SEQ ID NO: 39628 - DNA, 21 bp, Homo sapiens
aggtccctcartcaacagcac

SEQ ID NO: 39629 - DNA, 21 bp, Homo sapiens
tattagcctcrtaaatgagtt

SEQ ID NO: 39630 - DNA, 21 bp, Homo sapiens
ccatcctaatyggtgtttgcc

SEQ ID NO: 39631 - DNA, 21 bp, Homo sapiens
tacatgtggartcaataaagc

SEQ ID NO: 39632 - DNA, 21 bp, Homo sapiens
agattctgttycaaggttaga

SEQ ID NO: 39633 - DNA, 21 bp, Homo sapiens
catgattgtcrattatgatta

SEQ ID NO: 39634 - DNA, 21 bp, Homo sapiens
tgcatgaagaytgactcttaa

SEQ ID NO: 39635 - DNA, 21 bp, Homo sapiens
ggcactgctgyagttctcctg

SEQ ID NO: 39636 - DNA, 21 bp, Homo sapiens
agcaaagactyagggaagaag

SEQ ID NO: 39637 - DNA, 21 bp, Homo sapiens
tgtatgtattsagatgagttt

SEQ ID NO: 39638 - DNA, 21 bp, Homo sapiens
tgactactgaytactactgag

SEQ ID NO: 39639 - DNA, 21 bp, Homo sapiens
ctccacctccygcagaaagtc

SEQ ID NO: 39640 - DNA, 21 bp, Homo sapiens
aactgaagtgragatcctgtg

SEQ ID NO: 39641 - DNA, 21 bp, Homo sapiens
aaggaaacaaygatgtacctt

SEQ ID NO: 39642 - DNA, 21 bp, Homo sapiens
tacacatgcaraggggccaac

SEQ ID NO: 39643 - DNA, 21 bp, Homo sapiens
acaggcatttrgcagcacaca

SEQ ID NO: 39644 - DNA, 21 bp, Homo sapiens
cttggcttcaygttcctaagc

SEQ ID NO: 39645 - DNA, 21 bp, Homo sapiens
ggtttgaggawgtttttggcc

SEQ ID NO: 39646 - DNA, 21 bp, Homo sapiens
tcatgctcagygtttctttta

SEQ ID NO: 39647 - DNA, 21 bp, Homo sapiens
atagattactytattacccaa

SEQ ID NO: 39648 - DNA, 21 bp, Homo sapiens
gacatatcccyttactttgat

SEQ ID NO: 39649 - DNA, 21 bp, Homo sapiens
ctaacacagcrgctggcatgt

SEQ ID NO: 39650 - DNA, 21 bp, Homo sapiens
gcaaaagcgtwgactaaattc

SEQ ID NO: 39651 - DNA, 21 bp, Homo sapiens
ttttccctgargttgctttca

SEQ ID NO: 39652 - DNA, 21 bp, Homo sapiens
cttgacaaaarccctgtaagg

SEQ ID NO: 39653 - DNA, 21 bp, Homo sapiens
atataaacagsatgacacata

SEQ ID NO: 39654 - DNA, 21 bp, Homo sapiens
agttcaagtcygtaaatcatt

SEQ ID NO: 39655 - DNA, 21 bp, Homo sapiens
gcctttaattytcaatcccaa

SEQ ID NO: 39656 - DNA, 21 bp, Homo sapiens
aaaccagcaaktctttgatag

SEQ ID NO: 39657 - DNA, 21 bp, Homo sapiens
ttggctgagtrtttaagatta

SEQ ID NO: 39658 - DNA, 21 bp, Homo sapiens
ctgtggttctraaagaagtaa

SEQ ID NO: 39659 - DNA, 21 bp, Homo sapiens
gaaatttcacrtgattttttg

SEQ ID NO: 39660 - DNA, 21 bp, Homo sapiens
ccatacagacrcctcactttt

SEQ ID NO: 39661 - DNA, 21 bp, Homo sapiens
tggacttgttyggctgcaaaa

SEQ ID NO: 39662 - DNA, 21 bp, Homo sapiens
atagaataaaktagtaatgag

SEQ ID NO: 39663 - DNA, 21 bp, Homo sapiens
ctgctagactrgagcatgtgg

SEQ ID NO: 39664 - DNA, 21 bp, Homo sapiens
caaagtgagtmtttccaggtc

SEQ ID NO: 39665 - DNA, 21 bp, Homo sapiens
aaagcaacatyaaatttgctg

SEQ ID NO: 39666 - DNA, 21 bp, Homo sapiens
gtccttctccktccctaactc

SEQ ID NO: 39667 - DNA, 21 bp, Homo sapiens
gtgagcaaggyaaagttggtt

SEQ ID NO: 39668 - DNA, 21 bp, Homo sapiens
tggcagaaggwacataagcca

SEQ ID NO: 39669 - DNA, 21 bp, Homo sapiens
atctacaatgrtgtcccaaag

SEQ ID NO: 39670 - DNA, 21 bp, Homo sapiens
atatccctagrtagatggcat

SEQ ID NO: 39671 - DNA, 21 bp, Homo sapiens
cagctaggctktaggaaccta

SEQ ID NO: 39672 - DNA, 21 bp, Homo sapiens
tgtcaatcagwtttccttttt

SEQ ID NO: 39673 - DNA, 21 bp, Homo sapiens
ctcaagaatcycttagacaag

SEQ ID NO: 39674 - DNA, 21 bp, Homo sapiens
actgcaaattsgttttatttt

SEQ ID NO: 39675 - DNA, 21 bp, Homo sapiens
acttttagctktttaagcact

SEQ ID NO: 39676 - DNA, 21 bp, Homo sapiens
tcacattctarttaaagggat

SEQ ID NO: 39677 - DNA, 21 bp, Homo sapiens
actaagcaggyataattaatt

SEQ ID NO: 39678 - DNA, 21 bp, Homo sapiens
tatttccccaytgaaagattg

SEQ ID NO: 39679 - DNA, 21 bp, Homo sapiens
tgccaaagagmtcaagcgagt

SEQ ID NO: 39680 - DNA, 21 bp, Homo sapiens
atgttctcaawtgttagcaat

SEQ ID NO: 39681 - DNA, 21 bp, Homo sapiens
agtatgtgagmaaatattgca

SEQ ID NO: 39682 - DNA, 21 bp, Homo sapiens
gagagcatttycaaagtcaca

SEQ ID NO: 39683 - DNA, 21 bp, Homo sapiens
tttcctattgrgccttcccca

SEQ ID NO: 39684 - DNA, 21 bp, Homo sapiens
ggttttagacstcttatccag

SEQ ID NO: 39685 - DNA, 21 bp, Homo sapiens
ataaaatctawgtctggaagc

SEQ ID NO: 39686 - DNA, 21 bp, Homo sapiens
tctggacccartcgttgttgg

SEQ ID NO: 39687 - DNA, 21 bp, Homo sapiens
tgggtccctaygtcaaaggca

SEQ ID NO: 39688 - DNA, 21 bp, Homo sapiens
atttcactggygtctttaagg

SEQ ID NO: 39689 - DNA, 21 bp, Homo sapiens
aataagatacragctttgaat

SEQ ID NO: 39690 - DNA, 21 bp, Homo sapiens
ggtaatcaaartaatgaaaat

SEQ ID NO: 39691 - DNA, 21 bp, Homo sapiens
tgttataacaygcatgaacct

SEQ ID NO: 39692 - DNA, 21 bp, Homo sapiens
caccatgatcragtcaggttt

SEQ ID NO: 39693 - DNA, 21 bp, Homo sapiens
catgcagaggraaagctcctt

SEQ ID NO: 39694 - DNA, 21 bp, Homo sapiens
aagatggcgasattagcaaac

SEQ ID NO: 39695 - DNA, 21 bp, Homo sapiens
atggaacattygtatattgtt

SEQ ID NO: 39696 - DNA, 21 bp, Homo sapiens
aattttaggaytagccatcat

SEQ ID NO: 39697 - DNA, 21 bp, Homo sapiens
tgccatccatrtaggtcaact

SEQ ID NO: 39698 - DNA, 21 bp, Homo sapiens
cctagactagyaaattaaggc

SEQ ID NO: 39699 - DNA, 21 bp, Homo sapiens
agagcattctsggaaaattag

SEQ ID NO: 39700 - DNA, 21 bp, Homo sapiens
ttcctagctaygaactggcat

SEQ ID NO: 39701 - DNA, 21 bp, Homo sapiens
acacttatacrtgaattttta

SEQ ID NO: 39702 - DNA, 21 bp, Homo sapiens
acccttctcaytctccagttg

SEQ ID NO: 39703 - DNA, 21 bp, Homo sapiens
tcctttgttgyggagctagta

SEQ ID NO: 39704 - DNA, 21 bp, Homo sapiens
tttttttagtygacggtttag

SEQ ID NO: 39705 - DNA, 21 bp, Homo sapiens
tataaatagcrgttgcaatat

SEQ ID NO: 39706 - DNA, 21 bp, Homo sapiens
accacgagggyaattcctttc

SEQ ID NO: 39707 - DNA, 21 bp, Homo sapiens
agggtagaagrcttagacaca

SEQ ID NO: 39708 - DNA, 21 bp, Homo sapiens
agcaaaccacrcgatgggcgt

SEQ ID NO: 39709 - DNA, 21 bp, Homo sapiens
gggaagcaccrtaattacagg

SEQ ID NO: 39710 - DNA, 21 bp, Homo sapiens
gcctgcgctgrgggaggaggt

SEQ ID NO: 39711 - DNA, 21 bp, Homo sapiens
gaggaggtgcytttcaaacct

SEQ ID NO: 39712 - DNA, 21 bp, Homo sapiens
tccccactcayccccgcactg

SEQ ID NO: 39713 - DNA, 21 bp, Homo sapiens
aaagctccccstggggcttcg

SEQ ID NO: 39714 - DNA, 21 bp, Homo sapiens
ctttcctgggmacttcccttc

SEQ ID NO: 39715 - DNA, 21 bp, Homo sapiens
accttggctcyaactctattg

SEQ ID NO: 39716 - DNA, 21 bp, Homo sapiens
agagagacccctagaatgttt

SEQ ID NO: 39717 - DNA, 20 bp, Homo sapiens
agagagaccctagaatgttt

SEQ ID NO: 39718 - DNA, 21 bp, Homo sapiens
acccctagaaygtttccctca

SEQ ID NO: 39719 - DNA, 21 bp, Homo sapiens
cagggctcacscagaaacctt

SEQ ID NO: 39720 - DNA, 21 bp, Homo sapiens
agaaaccttcsttacactcct

SEQ ID NO: 39721 - DNA, 21 bp, Homo sapiens
tgtggtggctygcgcctgtaa

SEQ ID NO: 39722 - DNA, 21 bp, Homo sapiens
cgaagcgggcrgatcacctga

SEQ ID NO: 39723 - DNA, 20 bp, Homo sapiens
gcacatgcctgtaatcccag

SEQ ID NO: 39724 - DNA, 24 bp, Homo sapiens
gcacatgcctcttggtaatcccag

SEQ ID NO: 39725 - DNA, 21 bp, Homo sapiens
tgaggcaggaraatcgcttga

SEQ ID NO: 39726 - DNA, 21 bp, Homo sapiens
caggaggaccrcttgagctca

SEQ ID NO: 39727 - DNA, 21 bp, Homo sapiens
tacctggggcygctgcagtcc

SEQ ID NO: 39728 - DNA, 21 bp, Homo sapiens
ggcctgaagcrccacagccgc

SEQ ID NO: 39729 - DNA, 21 bp, Homo sapiens
tgcctgccgcrtgctgctggc

SEQ ID NO: 39730 - DNA, 24 bp, Homo sapiens
ggggaagtgacctggttagaccca

SEQ ID NO: 39731 - DNA, 20 bp, Homo sapiens
ggggaagtgagttagaccca

SEQ ID NO: 39732 - DNA, 21 bp, Homo sapiens
cctgggaggtrgaggttgcag

SEQ ID NO: 39733 - DNA, 21 bp, Homo sapiens
ccaccacaccyggctaatttt

SEQ ID NO: 39734 - DNA, 21 bp, Homo sapiens
ggtgatccgcstgcctcagcc

SEQ ID NO: 39735 - DNA, 21 bp, Homo sapiens
tcccaaagtgwcaggattaca

SEQ ID NO: 39736 - DNA, 21 bp, Homo sapiens
cccaaagtgtsaggattacag

SEQ ID NO: 39737 - DNA, 24 bp, Homo sapiens
tccaatggctttctattgacttac

SEQ ID NO: 39738 - DNA, 20 bp, Homo sapiens
tccaatggctattgacttac

SEQ ID NO: 39739 - DNA, 21 bp, Homo sapiens
caaggtccccygctcagaggc

SEQ ID NO: 39740 - DNA, 23 bp, Homo sapiens
cagtttctatcatatcatcgtac

SEQ ID NO: 39741 - DNA, 20 bp, Homo sapiens
cagtttctatatcatcgtac

SEQ ID NO: 39742 - DNA, 21 bp, Homo sapiens
tcatatcatcrtactgtactt

SEQ ID NO: 39743 - DNA, 20 bp, Homo sapiens
ccatctgctcgctcgctctc

SEQ ID NO: 39744 - DNA, 66 bp, Homo sapiens
ccatctgctcacttatttgaaacgatctcgttcatctgtttaggtcccatctgctcgctcgctctc

SEQ ID NO: 39745 - DNA, 21 bp, Homo sapiens
ctgctcgctckctctcccact

SEQ ID NO: 39746 - DNA, 21 bp, Homo sapiens
tacagtgcctrgctctgacat

SEQ ID NO: 39747 - DNA, 21 bp, Homo sapiens
agtgcctggcwctgacattcc

SEQ ID NO: 39748 - DNA, 21 bp, Homo sapiens
gtgcctggctytgacattcct

SEQ ID NO: 39749 - DNA, 21 bp, Homo sapiens
ctggggattgsagctggagca

SEQ ID NO: 39750 - DNA, 21 bp, Homo sapiens
ctcatcatgcsagagtctgaa

SEQ ID NO: 39751 - DNA, 21 bp, Homo sapiens
caggtgcagawgctgaacact

SEQ ID NO: 39752 - DNA, 21 bp, Homo sapiens
gaatctggcgyaaggagacca

SEQ ID NO: 39753 - DNA, 21 bp, Homo sapiens
tgggctgatgytctaggagcc

SEQ ID NO: 39754 - DNA, 21 bp, Homo sapiens
tcctcatcccygaaccatcct

SEQ ID NO: 39755 - DNA, 21 bp, Homo sapiens
gggatgccaargcgggcggat

SEQ ID NO: 39756 - DNA, 21 bp, Homo sapiens
atcacgaggtyaggagctcga

SEQ ID NO: 39757 - DNA, 21 bp, Homo sapiens
gtctctactgmaaatacaaaa

SEQ ID NO: 39758 - DNA, 21 bp, Homo sapiens
ggttcatgtartcttcccaca

SEQ ID NO: 39759 - DNA, 21 bp, Homo sapiens
gtaagcttggkgtacaggtgc

SEQ ID NO: 39760 - DNA, 21 bp, Homo sapiens
ctcaggtgatmcacccacctc

SEQ ID NO: 39761 - DNA, 21 bp, Homo sapiens
atcagcaggasctttgattcg

SEQ ID NO: 39762 - DNA, 21 bp, Homo sapiens
tcctgctggcmctggcgtgct

SEQ ID NO: 39763 - DNA, 21 bp, Homo sapiens
ccctagacacygggtttttcc

SEQ ID NO: 39764 - DNA, 21 bp, Homo sapiens
ctctccacccyctggcaacca

SEQ ID NO: 39765 - DNA, 21 bp, Homo sapiens
tcttcccgcarctgctgcaac

SEQ ID NO: 39766 - DNA, 21 bp, Homo sapiens
caaggctcacrtctgtgaccg

SEQ ID NO: 39767 - DNA, 21 bp, Homo sapiens
gggacagctgrgacggggaag

SEQ ID NO: 39768 - DNA, 21 bp, Homo sapiens
aaagagtcagragaaataacc

SEQ ID NO: 39769 - DNA, 21 bp, Homo sapiens
caggagaaatmacccagctgc

SEQ ID NO: 39770 - DNA, 21 bp, Homo sapiens
ccatcccaccwcagtcctcat

SEQ ID NO: 39771 - DNA, 21 bp, Homo sapiens
ctcaaagtgcmcaaacttcac

SEQ ID NO: 39772 - DNA, 21 bp, Homo sapiens
tcaggcctggrggggaaaaag

SEQ ID NO: 39773 - DNA, 21 bp, Homo sapiens
caggcctggargggaaaaagc

SEQ ID NO: 39774 - DNA, 21 bp, Homo sapiens
gagaaagtggrgacagggagt

SEQ ID NO: 39775 - DNA, 21 bp, Homo sapiens
atcctctctgrtcaggggcag

SEQ ID NO: 39776 - DNA, 21 bp, Homo sapiens
ctggccaacayggtgaaactc

SEQ ID NO: 39777 - DNA, 21 bp, Homo sapiens
ctactccagargctgaggcac

SEQ ID NO: 39778 - DNA, 21 bp, Homo sapiens
tctagcaccartgacgggcag

SEQ ID NO: 39779 - DNA, 21 bp, Homo sapiens
cctaccacagyctcttattaa

SEQ ID NO: 39780 - DNA, 21 bp, Homo sapiens
ctaccacagcycttattaaag

SEQ ID NO: 39781 - DNA, 21 bp, Homo sapiens
agtttggactrctttaagcct

SEQ ID NO: 39782 - DNA, 21 bp, Homo sapiens
ttctgtgatcrcctggtacca

SEQ ID NO: 39783 - DNA, 21 bp, Homo sapiens
tcaaaccctgwccacagtgca

SEQ ID NO: 39784 - DNA, 21 bp, Homo sapiens
ggattgaaccygggtggtagg

SEQ ID NO: 39785 - DNA, 21 bp, Homo sapiens
tttaaagctamattagtccct

SEQ ID NO: 39786 - DNA, 21 bp, Homo sapiens
aaggtacaaayccaagagaag

SEQ ID NO: 39787 - DNA, 21 bp, Homo sapiens
gaaggaagtgrtgggcaagga

SEQ ID NO: 39788 - DNA, 21 bp, Homo sapiens
cgataacaatmaacatttaca

SEQ ID NO: 39789 - DNA, 21 bp, Homo sapiens
cctgccggccrggcacggtgg

SEQ ID NO: 39790 - DNA, 21 bp, Homo sapiens
gtgacagtgcragactctgtc

SEQ ID NO: 39791 - DNA, 21 bp, Homo sapiens
aaagaactacytgccttgggt

SEQ ID NO: 39792 - DNA, 20 bp, Homo sapiens
tgttttcttagaggtttttc

SEQ ID NO: 39793 - DNA, 21 bp, Homo sapiens
tgttttcttaagaggtttttc

SEQ ID NO: 39794 - DNA, 21 bp, Homo sapiens
tcatacaacarttgtaggtaa

SEQ ID NO: 39795 - DNA, 21 bp, Homo sapiens
agtaagtatayagctttaaat

SEQ ID NO: 39796 - DNA, 21 bp, Homo sapiens
attagccgggygtagtggagg

SEQ ID NO: 39797 - DNA, 21 bp, Homo sapiens
actcgggaggytgaggcagga

SEQ ID NO: 39798 - DNA, 21 bp, Homo sapiens
ggttgcagtgrgccaagattg

SEQ ID NO: 39799 - DNA, 21 bp, Homo sapiens
gccaagattgygccattgcac

SEQ ID NO: 39800 - DNA, 21 bp, Homo sapiens
tactgcaagtraagatcctcc

SEQ ID NO: 39801 - DNA, 21 bp, Homo sapiens
aaacatgcaaygggaaattca

SEQ ID NO: 39802 - DNA, 21 bp, Homo sapiens
aacctgaggtrgcagaaacac

SEQ ID NO: 39803 - DNA, 21 bp, Homo sapiens
acaagcctcarctgctcctcg

SEQ ID NO: 39804 - DNA, 21 bp, Homo sapiens
gctgctcctcrgctgaggctg

SEQ ID NO: 39805 - DNA, 21 bp, Homo sapiens
tgctgccaccracgcctggcc

SEQ ID NO: 39806 - DNA, 21 bp, Homo sapiens
cctccccgagyctctagtagg

SEQ ID NO: 39807 - DNA, 21 bp, Homo sapiens
acaccaacctyggcacccata

SEQ ID NO: 39808 - DNA, 21 bp, Homo sapiens
agagagagctrggcagggccc

SEQ ID NO: 39809 - DNA, 21 bp, Homo sapiens
ggggggagggrgggcgggcga

SEQ ID NO: 39810 - DNA, 21 bp, Homo sapiens
gagggcgggcracgggggtgg

SEQ ID NO: 39811 - DNA, 21 bp, Homo sapiens
cgcagcacggyggctcacacc

SEQ ID NO: 39812 - DNA, 21 bp, Homo sapiens
gctcacacctrtaatcccagc

SEQ ID NO: 39813 - DNA, 21 bp, Homo sapiens
gatcagcctgrccaacatggt

SEQ ID NO: 39814 - DNA, 21 bp, Homo sapiens
aggagaatcayttgaacctgg

SEQ ID NO: 39815 - DNA, 21 bp, Homo sapiens
acctgggaggyggaggttgca

SEQ ID NO: 39816 - DNA, 21 bp, Homo sapiens
gcactccagcmtgggtgacaa

SEQ ID NO: 39817 - DNA, 21 bp, Homo sapiens
cactccagccktgggtgacaa

SEQ ID NO: 39818 - DNA, 21 bp, Homo sapiens
tccagcctgggtgacaagaac

SEQ ID NO: 39819 - DNA, 20 bp, Homo sapiens
tccagcctggtgacaagaac

SEQ ID NO: 39820 - DNA, 21 bp, Homo sapiens
aaaaaaaaaaraaaagaaaag

SEQ ID NO: 39821 - DNA, 21 bp, Homo sapiens
aaaaaaaaaaraaaagaaaag

SEQ ID NO: 39822 - DNA, 21 bp, Homo sapiens
tggaatctgarcccagtgttc

SEQ ID NO: 39823 - DNA, 21 bp, Homo sapiens
gtgcccactcraagatgggaa

SEQ ID NO: 39824 - DNA, 21 bp, Homo sapiens
agcccttgacmcaccccacaa

SEQ ID NO: 39825 - DNA, 21 bp, Homo sapiens
acagtctctcygtcacattat

SEQ ID NO: 39826 - DNA, 21 bp, Homo sapiens
agccactatgmccggctaatt

SEQ ID NO: 39827 - DNA, 21 bp, Homo sapiens
cactatgcccrgctaattttt

SEQ ID NO: 39828 - DNA, 22 bp, Homo sapiens
ttttagtagagacgggatttca

SEQ ID NO: 39829 - DNA, 20 bp, Homo sapiens
ttttagtagacgggatttca

SEQ ID NO: 39830 - DNA, 21 bp, Homo sapiens
tgcctcggtcycccaaactgt

SEQ ID NO: 39831 - DNA, 21 bp, Homo sapiens
gtcaggagttsggagaccaaa

SEQ ID NO: 39832 - DNA, 21 bp, Homo sapiens
tcaggagttgragaccaaagt

SEQ ID NO: 39833 - DNA, 21 bp, Homo sapiens
ccactgcaccyggcttcaatc

SEQ ID NO: 39834 - DNA, 23 bp, Homo sapiens
aaccactcaataaacactggttg

SEQ ID NO: 39835 - DNA, 20 bp, Homo sapiens
aaccactcaaacactggttg

SEQ ID NO: 39836 - DNA, 21 bp, Homo sapiens
gggagaaaagygtgggctcct

SEQ ID NO: 39837 - DNA, 21 bp, Homo sapiens
cctgcatggtktccagaagct

SEQ ID NO: 39838 - DNA, 21 bp, Homo sapiens
ctggctgtggrcctcagaagg

SEQ ID NO: 39839 - DNA, 21 bp, Homo sapiens
cctcagaaggsacttgttccc

SEQ ID NO: 39840 - DNA, 21 bp, Homo sapiens
aggacagctgyggaaagaaga

SEQ ID NO: 39841 - DNA, 21 bp, Homo sapiens
cgaccccacayggaggccttc

SEQ ID NO: 39842 - DNA, 21 bp, Homo sapiens
actcactctcygcagctgccc

SEQ ID NO: 39843 - DNA, 21 bp, Homo sapiens
gaccccaggcratagcccctc

SEQ ID NO: 39844 - DNA, 21 bp, Homo sapiens
cctctaatacygtccctcccc

SEQ ID NO: 39845 - DNA, 21 bp, Homo sapiens
atatcttgctyatgtgtatgt

SEQ ID NO: 39846 - DNA, 21 bp, Homo sapiens
cacctcaaagkgttgcagggg

SEQ ID NO: 39847 - DNA, 21 bp, Homo sapiens
taatttggggkacataaatga

SEQ ID NO: 39848 - DNA, 21 bp, Homo sapiens
gtcaggagatygagatcatcc

SEQ ID NO: 39849 - DNA, 21 bp, Homo sapiens
ctggctaacayggtgaaaccc

SEQ ID NO: 39850 - DNA, 21 bp, Homo sapiens
ttagctgggcrtggtggcggg

SEQ ID NO: 39851 - DNA, 21 bp, Homo sapiens
gaagaatgacwtgaacccggg

SEQ ID NO: 39852 - DNA, 21 bp, Homo sapiens
aggcggagctkgcagtgagcc

SEQ ID NO: 39853 - DNA, 21 bp, Homo sapiens
ctcaccctccycgcctcaccc

SEQ ID NO: 39854 - DNA, 33 bp, Homo sapiens
caccctcccgcctcaccctcccgagtagctgag

SEQ ID NO: 39855 - DNA, 20 bp, Homo sapiens
caccctcccgagtagctgag

SEQ ID NO: 39856 - DNA, 21 bp, Homo sapiens
gtgccctgggycctgggctct

SEQ ID NO: 39857 - DNA, 21 bp, Homo sapiens
caagtgtcttmcagctaccac

SEQ ID NO: 39858 - DNA, 21 bp, Homo sapiens
tcagcacaaayggtagcttgt

SEQ ID NO: 39859 - DNA, 21 bp, Homo sapiens
agcacaaacgrtagcttgttg

SEQ ID NO: 39860 - DNA, 21 bp, Homo sapiens
tgtaacctctstctcccaggt

SEQ ID NO: 39861 - DNA, 21 bp, Homo sapiens
tgcctcagccycccaagaagc

SEQ ID NO: 39862 - DNA, 21 bp, Homo sapiens
ggattacaggygcccacgact

SEQ ID NO: 39863 - DNA, 21 bp, Homo sapiens
gttggccaggytggtctttaa

SEQ ID NO: 39864 - DNA, 21 bp, Homo sapiens
gctgggattayaggcatgagc

SEQ ID NO: 39865 - DNA, 21 bp, Homo sapiens
tgctggtcttycccttaccaa

SEQ ID NO: 39866 - DNA, 25 bp, Homo sapiens
tttttattttattttttgagacaga

SEQ ID NO: 39867 - DNA, 20 bp, Homo sapiens
tttttattttttgagacaga

SEQ ID NO: 39868 - DNA, 21 bp, Homo sapiens
cccaagtagcygggattacag

SEQ ID NO: 39869 - DNA, 21 bp, Homo sapiens
cgcaccaccaygcctggtgaa

SEQ ID NO: 39870 - DNA, 21 bp, Homo sapiens
ctggtgaattytttttatttt

SEQ ID NO: 39871 - DNA, 21 bp, Homo sapiens
gtgaatttttktatttttagt

SEQ ID NO: 39872 - DNA, 21 bp, Homo sapiens
tccatccacgwaggcaggact

SEQ ID NO: 39873 - DNA, 20 bp, Homo sapiens
agagatggcagagtaagtac

SEQ ID NO: 39874 - DNA, 22 bp, Homo sapiens
agagatggcaaagagtaagtac

SEQ ID NO: 39875 - DNA, 21 bp, Homo sapiens
ccttatacccmccttcctcac

SEQ ID NO: 39876 - DNA, 21 bp, Homo sapiens
ggaggccaccygagtcttggg

SEQ ID NO: 39877 - DNA, 21 bp, Homo sapiens
agtcttgggggaaaagtgcaa

SEQ ID NO: 39878 - DNA, 20 bp, Homo sapiens
agtcttggggaaaagtgcaa

SEQ ID NO: 39879 - DNA, 21 bp, Homo sapiens
atctttctagsccatgtgtgt

SEQ ID NO: 39880 - DNA, 21 bp, Homo sapiens
gctcccgctgsctcccctctt

SEQ ID NO: 39881 - DNA, 21 bp, Homo sapiens
cctcttccaarttcttccgga

SEQ ID NO: 39882 - DNA, 21 bp, Homo sapiens
cgcaggagccrgacctcctcc

SEQ ID NO: 39883 - DNA, 21 bp, Homo sapiens
tcctccagccrccgcagctct

SEQ ID NO: 39884 - DNA, 21 bp, Homo sapiens
aagctggggtrtggggatgtc

SEQ ID NO: 39885 - DNA, 21 bp, Homo sapiens
cgaggcgggcrgatcacgagg

SEQ ID NO: 39886 - DNA, 21 bp, Homo sapiens
ctagctgggcrtggtggcagg

SEQ ID NO: 39887 - DNA, 21 bp, Homo sapiens
cctgggaggcrgagcttgcag

SEQ ID NO: 39888 - DNA, 21 bp, Homo sapiens
aggtatacttyatgaggagtc

SEQ ID NO: 39889 - DNA, 21 bp, Homo sapiens
gactataagarattgttgttg

SEQ ID NO: 39890 - DNA, 21 bp, Homo sapiens
ttgttgttgtygtttttagag

SEQ ID NO: 39891 - DNA, 21 bp, Homo sapiens
tagtagcagcratctgtaggc

SEQ ID NO: 39892 - DNA, 21 bp, Homo sapiens
gattctgtctycagccatcta

SEQ ID NO: 39893 - DNA, 24 bp, Homo sapiens
caagcaactaactatcaagtggag

SEQ ID NO: 39894 - DNA, 20 bp, Homo sapiens
caagcaactatcaagtggag

SEQ ID NO: 39895 - DNA, 21 bp, Homo sapiens
ggcagtgcctytaccctcctc

SEQ ID NO: 39896 - DNA, 21 bp, Homo sapiens
gtgggcacttkaagatcttcc

SEQ ID NO: 39897 - DNA, 21 bp, Homo sapiens
tcacccccatstctcaatagc

SEQ ID NO: 39898 - DNA, 21 bp, Homo sapiens
cctagataccmgaggcttcac

SEQ ID NO: 39899 - DNA, 21 bp, Homo sapiens
tgttctgatckcttcatctgt

SEQ ID NO: 39900 - DNA, 21 bp, Homo sapiens
ctttggccacwccccctacgc

SEQ ID NO: 39901 - DNA, 21 bp, Homo sapiens
tggggcgctgyccaatggcgc

SEQ ID NO: 39902 - DNA, 21 bp, Homo sapiens
ctggccaatcsggaacggcac

SEQ ID NO: 39903 - DNA, 21 bp, Homo sapiens
ggaagaagctrctcttctccg

SEQ ID NO: 39904 - DNA, 21 bp, Homo sapiens
aaatattttgygatctgagga

SEQ ID NO: 39905 - DNA, 21 bp, Homo sapiens
ccacaagaccytgctgcctgc

SEQ ID NO: 39906 - DNA, 21 bp, Homo sapiens
ttggatggatrgtcgtggtcc

SEQ ID NO: 39907 - DNA, 21 bp, Homo sapiens
ttaattttttwaaaaaagcct

SEQ ID NO: 39908 - DNA, 21 bp, Homo sapiens
aagcctgggcrcggtggctca

SEQ ID NO: 39909 - DNA, 21 bp, Homo sapiens
tcaggagttcragaccatcct

SEQ ID NO: 39910 - DNA, 21 bp, Homo sapiens
tggcgtgcacytgtaacccca

SEQ ID NO: 39911 - DNA, 21 bp, Homo sapiens
acaaacaaacmaaaagcttgc

SEQ ID NO: 39912 - DNA, 21 bp, Homo sapiens
ggtggctcacrcctgtaatcc

SEQ ID NO: 39913 - DNA, 21 bp, Homo sapiens
tgggaggcggwttcaagcttg

SEQ ID NO: 39914 - DNA, 20 bp, Homo sapiens
gggaggcggttcaagcttgg

SEQ ID NO: 39915 - DNA, 50 bp, Homo sapiens
gggaggcggtgtgcagtgagctgagattgcactactgcactcaagcttgg

SEQ ID NO: 39916 - DNA, 21 bp, Homo sapiens
gaggcggttcmagcttgggca

SEQ ID NO: 39917 - DNA, 21 bp, Homo sapiens
agaaaaaaaawgaagaaagaa

SEQ ID NO: 39918 - DNA, 21 bp, Homo sapiens
ccctgaagggyccccaggaac

SEQ ID NO: 39919 - DNA, 21 bp, Homo sapiens
acctggggaartggggaccac

SEQ ID NO: 39920 - DNA, 21 bp, Homo sapiens
ctgctccaccmcaacgcaatc

SEQ ID NO: 39921 - DNA, 21 bp, Homo sapiens
tgctttttacrttcatatggc

SEQ ID NO: 39922 - DNA, 21 bp, Homo sapiens
taaggtccacygccaaggcac

SEQ ID NO: 39923 - DNA, 21 bp, Homo sapiens
tccctccccargagggaatga

SEQ ID NO: 39924 - DNA, 21 bp, Homo sapiens
ccataaggccrtgttgccatg

SEQ ID NO: 39925 - DNA, 21 bp, Homo sapiens
aaagccatgcytgcaaccgat

SEQ ID NO: 39926 - DNA, 21 bp, Homo sapiens
acctgccacayccgccctttc

SEQ ID NO: 39927 - DNA, 21 bp, Homo sapiens
ccaagtttttwttacatggaa

SEQ ID NO: 39928 - DNA, 21 bp, Homo sapiens
caagttttttwtacatggaag

SEQ ID NO: 39929 - DNA, 21 bp, Homo sapiens
agtttttttacatggaagaaa

SEQ ID NO: 39930 - DNA, 20 bp, Homo sapiens
agtttttttaatggaagaaa

SEQ ID NO: 39931 - DNA, 21 bp, Homo sapiens
tggggtgatcwaggttcaaca

SEQ ID NO: 39932 - DNA, 21 bp, Homo sapiens
ctgtgtcccargcttctttat

SEQ ID NO: 39933 - DNA, 21 bp, Homo sapiens
gagtggtgacrgagacagggg

SEQ ID NO: 39934 - DNA, 21 bp, Homo sapiens
gaccacctgcmagtgaatgac

SEQ ID NO: 39935 - DNA, 21 bp, Homo sapiens
tgccagtgaaygacagaaagg

SEQ ID NO: 39936 - DNA, 22 bp, Homo sapiens
tgagctgagagacgggcctgac

SEQ ID NO: 39937 - DNA, 20 bp, Homo sapiens
tgagctgagacgggcctgac

SEQ ID NO: 39938 - DNA, 21 bp, Homo sapiens
agatggagccygcagagagac

SEQ ID NO: 39939 - DNA, 21 bp, Homo sapiens
gcctgcacgarggtttctgct

SEQ ID NO: 39940 - DNA, 21 bp, Homo sapiens
ccacttctgcrgcaagggccg

SEQ ID NO: 39941 - DNA, 21 bp, Homo sapiens
gagaagcaaartgagggagca

SEQ ID NO: 39942 - DNA, 26 bp, Homo sapiens
agctcaaagcccaagcatcttctccc

SEQ ID NO: 39943 - DNA, 20 bp, Homo sapiens
agctcaaagcatcttctccc

SEQ ID NO: 39944 - DNA, 22 bp, Homo sapiens
gtgagggtagagtctgcccctg

SEQ ID NO: 39945 - DNA, 20 bp, Homo sapiens
gtgagggtagtctgcccctg

SEQ ID NO: 39946 - DNA, 21 bp, Homo sapiens
ggggagatgcrgtcagaatct

SEQ ID NO: 39947 - DNA, 21 bp, Homo sapiens
gtagaagtgcmtctgccttcc

SEQ ID NO: 39948 - DNA, 21 bp, Homo sapiens
tcatgcatgtwacaaaggact

SEQ ID NO: 39949 - DNA, 21 bp, Homo sapiens
catccaaggggatgcagaagc

SEQ ID NO: 39950 - DNA, 20 bp, Homo sapiens
catccaagggatgcagaagc

SEQ ID NO: 39951 - DNA, 21 bp, Homo sapiens
gggatgcagaagcatggtgaa

SEQ ID NO: 39952 - DNA, 20 bp, Homo sapiens
gggatgcagagcatggtgaa

SEQ ID NO: 39953 - DNA, 21 bp, Homo sapiens
gcagaagcatsgtgaaaggac

SEQ ID NO: 39954 - DNA, 21 bp, Homo sapiens
ggcctcgagggagaacacctg

SEQ ID NO: 39955 - DNA, 20 bp, Homo sapiens
ggcctcgaggagaacacctg

SEQ ID NO: 39956 - DNA, 21 bp, Homo sapiens
ctcgagggagmacacctgtca

SEQ ID NO: 39957 - DNA, 21 bp, Homo sapiens
cggtggctcaygcctataatt

SEQ ID NO: 39958 - DNA, 21 bp, Homo sapiens
gctaaattcartatatactct

SEQ ID NO: 39959 - DNA, 23 bp, Homo sapiens
gtacttactcctcattttttaaa

SEQ ID NO: 39960 - DNA, 20 bp, Homo sapiens
gtacttactcattttttaaa

SEQ ID NO: 39961 - DNA, 21 bp, Homo sapiens
aagtgctattyggcacttgtt

SEQ ID NO: 39962 - DNA, 21 bp, Homo sapiens
agacccgtgcygccccttctc

SEQ ID NO: 39963 - DNA, 21 bp, Homo sapiens
ctatttaaaawatatatatat

SEQ ID NO: 39964 - DNA, 21 bp, Homo sapiens
tggaaaaaagyaaagcagtcc

SEQ ID NO: 39965 - DNA, 21 bp, Homo sapiens
caaagcagtcygggcgcagtg

SEQ ID NO: 39966 - DNA, 21 bp, Homo sapiens
gtcaggagttytgagactagc

SEQ ID NO: 39967 - DNA, 21 bp, Homo sapiens
tcaggagtttragactagcct

SEQ ID NO: 39968 - DNA, 21 bp, Homo sapiens
caggaggctgrggcaggagaa

SEQ ID NO: 39969 - DNA, 21 bp, Homo sapiens
ttagtccaagygaaatgatct

SEQ ID NO: 39970 - DNA, 21 bp, Homo sapiens
ttttctccccmccccaagacg

SEQ ID NO: 39971 - DNA, 21 bp, Homo sapiens
tctccccccccaagacggaat

SEQ ID NO: 39972 - DNA, 20 bp, Homo sapiens
tctcccccccaagacggaat

SEQ ID NO: 39973 - DNA, 21 bp, Homo sapiens
ccaccttggcytcccaaagtg

SEQ ID NO: 39974 - DNA, 21 bp, Homo sapiens
accgcaacctmcatctcccag

SEQ ID NO: 39975 - DNA, 21 bp, Homo sapiens
tcgaactcccracctcaggtg

SEQ ID NO: 39976 - DNA, 21 bp, Homo sapiens
gatgtaggacrtgaaagaaac

SEQ ID NO: 39977 - DNA, 21 bp, Homo sapiens
aaatggcattyaagccttgag

SEQ ID NO: 39978 - DNA, 21 bp, Homo sapiens
atggcatttargccttgaggg

SEQ ID NO: 39979 - DNA, 21 bp, Homo sapiens
ggctgccggcrgacagaggtg

SEQ ID NO: 39980 - DNA, 21 bp, Homo sapiens
tttttgtagtyctgaagcctc

SEQ ID NO: 39981 - DNA, 21 bp, Homo sapiens
ctctgctatcytggattttcc

SEQ ID NO: 39982 - DNA, 21 bp, Homo sapiens
tgtcgccttgraggactggaa

SEQ ID NO: 39983 - DNA, 21 bp, Homo sapiens
tcacaccctaractttcagga

SEQ ID NO: 39984 - DNA, 21 bp, Homo sapiens
ccaaccccaasctgggtctgg

SEQ ID NO: 39985 - DNA, 21 bp, Homo sapiens
gctgggccagracagagcaaa

SEQ ID NO: 39986 - DNA, 24 bp, Homo sapiens
ctgggccagacagagcaaaggcca

SEQ ID NO: 39987 - DNA, 20 bp, Homo sapiens
ctgggccagagcaaaggcca

SEQ ID NO: 39988 - DNA, 21 bp, Homo sapiens
ggccagcttcygactctccca

SEQ ID NO: 39989 - DNA, 21 bp, Homo sapiens
tctcccaggcygctctgccct

SEQ ID NO: 39990 - DNA, 21 bp, Homo sapiens
tgccctcacckgcagttgtct

SEQ ID NO: 39991 - DNA, 21 bp, Homo sapiens
ccagcttccasttcccacctg

SEQ ID NO: 39992 - DNA, 21 bp, Homo sapiens
cagggctgccwgcagttgata

SEQ ID NO: 39993 - DNA, 21 bp, Homo sapiens
ctcctgcttcrccctcaggct

SEQ ID NO: 39994 - DNA, 21 bp, Homo sapiens
gcgagaaggcraaatctgaag

SEQ ID NO: 39995 - DNA, 21 bp, Homo sapiens
aggcaaaatcygaagccaggt

SEQ ID NO: 39996 - DNA, 21 bp, Homo sapiens
gacacaactgscgcccctcca

SEQ ID NO: 39997 - DNA, 21 bp, Homo sapiens
acagggtctcrctttgttgcc

SEQ ID NO: 39998 - DNA, 21 bp, Homo sapiens
agcctcctaaktggctgggac

SEQ ID NO: 39999 - DNA, 21 bp, Homo sapiens
cctcaagaaaycctcccgcct

SEQ ID NO: 40000 - DNA, 21 bp, Homo sapiens
aaatcctcccrcctctgccgc

SEQ ID NO: 40001 - DNA, 21 bp, Homo sapiens
cactcccacamctccatgttc

SEQ ID NO: 40002 - DNA, 21 bp, Homo sapiens
cactcccacawctccatgttc

SEQ ID NO: 40003 - DNA, 21 bp, Homo sapiens
cactcccacayctccatgttc

SEQ ID NO: 40004 - DNA, 21 bp, Homo sapiens
tcctaggcatycccatcccga

SEQ ID NO: 40005 - DNA, 20 bp, Homo sapiens
cccaccccccatccccccac

SEQ ID NO: 40006 - DNA, 21 bp, Homo sapiens
cccacccccccatccccccac

SEQ ID NO: 40007 - DNA, 21 bp, Homo sapiens
tcttccagaakcagactccag

SEQ ID NO: 40008 - DNA, 21 bp, Homo sapiens
aaggggttggyccctacttcc

SEQ ID NO: 40009 - DNA, 21 bp, Homo sapiens
tttggactgaytgggcctcag

SEQ ID NO: 40010 - DNA, 21 bp, Homo sapiens
gcctcagtttmccaacctttg

SEQ ID NO: 40011 - DNA, 21 bp, Homo sapiens
aagggcccccyacagggacct

SEQ ID NO: 40012 - DNA, 21 bp, Homo sapiens
tcctctggggractcaggcgt

SEQ ID NO: 40013 - DNA, 21 bp, Homo sapiens
ttcatcgtgcrtccctccccg

SEQ ID NO: 40014 - DNA, 21 bp, Homo sapiens
tccccgagccycggaagattg

SEQ ID NO: 40015 - DNA, 21 bp, Homo sapiens
ccgagcccggmagattgaggg

SEQ ID NO: 40016 - DNA, 21 bp, Homo sapiens
gcccggaagaytgagggatgt

SEQ ID NO: 40017 - DNA, 21 bp, Homo sapiens
gaggaggtggmgagtgatttg

SEQ ID NO: 40018 - DNA, 21 bp, Homo sapiens
tttgtggaggsgtgcaggaag

SEQ ID NO: 40019 - DNA, 21 bp, Homo sapiens
tttctgggccyggcctgagta

SEQ ID NO: 40020 - DNA, 21 bp, Homo sapiens
ttgtctgctgrggtcagtggc

SEQ ID NO: 40021 - DNA, 21 bp, Homo sapiens
cagtggctctrtctgccttct

SEQ ID NO: 40022 - DNA, 21 bp, Homo sapiens
agtggggttgsagctgtgttc

SEQ ID NO: 40023 - DNA, 21 bp, Homo sapiens
tggtgggggtrggaggaacat

SEQ ID NO: 40024 - DNA, 21 bp, Homo sapiens
gggtgcctggrtccctggctg

SEQ ID NO: 40025 - DNA, 121 bp, Homo sapiens
aacgagtgaaattccgtctcaaaaaaaaaaaacatatatatatatatatatatatcaggccaggcgtagtggctcatgccagcactttgggaagctgacacaggaggaccgcttgagctca

SEQ ID NO: 40026 - DNA, 121 bp, Homo sapiens
ccgtctcaaaaaaaaaaaacatatatatatatatatatatatcaggccaggcgtagtggctcatgccagcactttgggaagctgacacaggaggaccgcttgagctcaggagttgtgtgcg

SEQ ID NO: 40027 - DNA, 121 bp, Homo sapiens
aacaagagcaaaactgtctcaaaaaaaaaaagtgctgggattacaggcaggagccacaacaccgggcccccttccctgtttttttttttttttttttaattcttcttctttttttgaggct

SEQ ID NO: 40028 - DNA, 121 bp, Homo sapiens
gacagaggaagactctgtctcaaacaacaacaacaacaaaacattaaatgattacaacttaaagtgattcaaaagatgtacaaatatgtgtgtatatagataagagaccaaatgtggcaaa

SEQ ID NO: 40029 - DNA, 121 bp, Homo sapiens
acagtgcgagactctgtctcaaaaaaaaaaaaaaaaaaaaaaagaactacctgccttgggtacctcagtgtctaaggctgaggggaagtcatcaccagcacaaagaagctttgctgttttc

SEQ ID NO: 40030 - DNA, 121 bp, Homo sapiens
caagaacaagactccttctcaaaaaaaaaaaaaaaaaaaaaagaaaagaaaaagaatgaatgccacgcagggagacagaagcttaggttctgaggatggaatctgagcccagtgttccatg

SEQ ID NO: 40031 - DNA, 121 bp, Homo sapiens
acagagcgagactccatctcaaaaaaaaaaaaaaaacaacctttcaacggttgcttattacttgaaaaaacaatttttttttgtttgtttttttggagatggagtttcactttgttgccta

SEQ ID NO: 40032 - DNA, 121 bp, Homo sapiens
atctgagctataaatatagcttttttttttctttttggctattcctaatgttcatgttataaagtcaatggatcaattttttcctttatggcttctagattttggattttgactcacaggt

SEQ ID NO: 40033 - DNA, 121 bp, Homo sapiens
acagagtgagactccatctcaaaaaaaaggcatttattgagtgttaggtatactttatgaggagtctgagagaacagtacataaataacacagtgccagcctttagagaaatcgtctacca

SEQ ID NO: 40034 - DNA, 121 bp, Homo sapiens
gccgccatatctggctcgctctttctttctttctttagtagcagcgatctgtaggctagggaaattaagtgacttgccaaatgtcctctagctggtagccaaactagaaatagagtctctg

SEQ ID NO: 40035 - DNA, 121 bp, Homo sapiens
atagagcaaaactccatctcaaaaaaaaaaaaaaagaaagaaagaaaaaaaaagaagaaagaaagaaaattggaccttaggacagtgagggcagggatcctttgtaggaaagcacaagaaa

SEQ ID NO: 40036 - DNA, 121 bp, Homo sapiens
catctcaaaaaaaaaaaaaaagaaagaaagaaaaaaaaagaagaaagaaagaaaattggaccttaggacagtgagggcagggatcctttgtaggaaagcacaagaaacacagacttgttcc

SEQ ID NO: 40037 - DNA, 121 bp, Homo sapiens
agcaagactctgtctcaaagaaaaaaaaaaaagaagatagttcatttaatacctgcaaaattctctcactcaagtatcacccccagtttaaggatgttttgagattagagaaatagataag

SEQ ID NO: 40038 - DNA, 121 bp, Homo sapiens
ccaccgcacctagcctcaccttttttttttttttttttgagagtttcgcttttgttgcctaggctggagtgcactggcgcgatctcggctcaccgcaacctccatctcccaggttcaagcg

SEQ ID NO: 40039 - DNA, 17 bp, Homo sapiens
actcacgctctgctgga

SEQ ID NO: 40040 - DNA, 20 bp, Homo sapiens
agcaagtgtcggagcttagg

SEQ ID NO: 40041 - DNA, 18 bp, Homo sapiens
cagatttgctggcactgg

SEQ ID NO: 40042 - DNA, 20 bp, Homo sapiens
gtacccagctcttactcctt

SEQ ID NO: 40043 - DNA, 18 bp, Homo sapiens
actgagatccctttcacc

SEQ ID NO: 40044 - DNA, 18 bp, Homo sapiens
ttcaaaagaggcacttcc

SEQ ID NO: 40045 - DNA, 20 bp, Homo sapiens
ctggagatgcactttatcca

SEQ ID NO: 40046 - DNA, 20 bp, Homo sapiens
aaaacctcggtatccaccaa

SEQ ID NO: 40047 - DNA, 18 bp, Homo sapiens
gcgttagcccaatccttc

SEQ ID NO: 40048 - DNA, 16 bp, Homo sapiens
ttgggccagtgcttgt

SEQ ID NO: 40049 - DNA, 20 bp, Homo sapiens
ctgcttgagcctgacttggt

SEQ ID NO: 40050 - DNA, 16 bp, Homo sapiens
aacaagagcggcttcc

SEQ ID NO: 40051 - DNA, 19 bp, Homo sapiens
aggctgcccattggttaag

SEQ ID NO: 40052 - DNA, 20 bp, Homo sapiens
tcaagattgggctgtacgtc

SEQ ID NO: 40053 - DNA, 16 bp, Homo sapiens
ttttcaggcagtgcag

SEQ ID NO: 40054 - DNA, 17 bp, Homo sapiens
gaccaccctgtttgttt

SEQ ID NO: 40055 - DNA, 17 bp, Homo sapiens
attcccaattccgcttt

SEQ ID NO: 40056 - DNA, 18 bp, Homo sapiens
cttgagtgggcctttgag

SEQ ID NO: 40057 - DNA, 18 bp, Homo sapiens
ctgaggtcagggccatag

SEQ ID NO: 40058 - DNA, 18 bp, Homo sapiens
gaccacgtgaaaggatgg

SEQ ID NO: 40059 - DNA, 18 bp, Homo sapiens
tcccatgaactgcatcac

SEQ ID NO: 40060 - DNA, 19 bp, Homo sapiens
ctgatgacctgcttatttc

SEQ ID NO: 40061 - DNA, 18 bp, Homo sapiens
gaaatcgttgatgagtcg

SEQ ID NO: 40062 - DNA, 20 bp, Homo sapiens
gctgaaatcatggaccactc

SEQ ID NO: 40063 - DNA, 18 bp, Homo sapiens
ttctgagccacggtgaag

SEQ ID NO: 40064 - DNA, 20 bp, Homo sapiens
taactgcctttagtaccttg

SEQ ID NO: 40065 - DNA, 25 bp, Homo sapiens
agctgtataatcttacctcctctgt

SEQ ID NO: 40066 - DNA, 18 bp, Homo sapiens
cggattgcgggtgaactc

SEQ ID NO: 40067 - DNA, 21 bp, Homo sapiens
gttgtcctggtggaatgtgtc

SEQ ID NO: 40068 - DNA, 19 bp, Homo sapiens
ttaataagccgatgcttgc

SEQ ID NO: 40069 - DNA, 18 bp, Homo sapiens
aaacgggaatcaggacac

SEQ ID NO: 40070 - DNA, 20 bp, Homo sapiens
ggcccaagagatcctcagtc

SEQ ID NO: 40071 - DNA, 18 bp, Homo sapiens
gcaatgccatccagctct

SEQ ID NO: 40072 - DNA, 19 bp, Homo sapiens
acgatgacaccctgtctgg

SEQ ID NO: 40073 - DNA, 17 bp, Homo sapiens
atggagcagcagcctga

SEQ ID NO: 40074 - DNA, 17 bp, Homo sapiens
caactggcgtggctgta

SEQ ID NO: 40075 - DNA, 21 bp, Homo sapiens
agaagtcctgtccttgaggtt

SEQ ID NO: 40076 - DNA, 18 bp, Homo sapiens
tgcaactccgttcttgct

SEQ ID NO: 40077 - DNA, 20 bp, Homo sapiens
aaagtccttgttgctccaga

SEQ ID NO: 40078 - DNA, 18 bp, Homo sapiens
tgttagagccatgcagtg

SEQ ID NO: 40079 - DNA, 20 bp, Homo sapiens
atgtggaatactgacacacg

SEQ ID NO: 40080 - DNA, 17 bp, Homo sapiens
tgcagcgacaatgtgga

SEQ ID NO: 40081 - DNA, 16 bp, Homo sapiens
tcccagagatgccatg

SEQ ID NO: 40082 - DNA, 18 bp, Homo sapiens
ctcagggttggagacttc

SEQ ID NO: 40083 - DNA, 20 bp, Homo sapiens
cttctcatgacagaagatgc

SEQ ID NO: 40084 - DNA, 18 bp, Homo sapiens
gctcaaatcccattgaag

SEQ ID NO: 40085 - DNA, 18 bp, Homo sapiens
gacaccatcttcctcctc

SEQ ID NO: 40086 - DNA, 18 bp, Homo sapiens
acgcaagaacctgctatc

SEQ ID NO: 40087 - DNA, 18 bp, Homo sapiens
ttcctgtcgttccaactc

SEQ ID NO: 40088 - DNA, 20 bp, Homo sapiens
gtaccagcaccagcttcgac

SEQ ID NO: 40089 - DNA, 18 bp, Homo sapiens
ttgccgggacaggtagtg

SEQ ID NO: 40090 - DNA, 20 bp, Homo sapiens
cgcctgtcctgtccataaac

SEQ ID NO: 40091 - DNA, 18 bp, Homo sapiens
gaggcaatgcagggagag

SEQ ID NO: 40092 - DNA, 18 bp, Homo sapiens
gtcaggagcatgaaatcg

SEQ ID NO: 40093 - DNA, 21 bp, Homo sapiens
gggctctctggaaatataagg

SEQ ID NO: 40094 - DNA, 18 bp, Homo sapiens
caggaggagtgtgaaatg

SEQ ID NO: 40095 - DNA, 18 bp, Homo sapiens
gtcctgggagaagagttg

SEQ ID NO: 40096 - DNA, 18 bp, Homo sapiens
ccgtagtcctgatgttgc

SEQ ID NO: 40097 - DNA, 18 bp, Homo sapiens
tcatgagtcggctttctg

SEQ ID NO: 40098 - DNA, 21 bp, Homo sapiens
ctgtgtccgatccctatctac

SEQ ID NO: 40099 - DNA, 21 bp, Homo sapiens
acatggtcttcgaattctcac

SEQ ID NO: 40100 - DNA, 18 bp, Homo sapiens
tgtcagggaaacaccaag

SEQ ID NO: 40101 - DNA, 20 bp, Homo sapiens
ggatgtgtcctcccagatac

SEQ ID NO: 40102 - DNA, 19 bp, Homo sapiens
ggctgtaactggaagcaac

SEQ ID NO: 40103 - DNA, 19 bp, Homo sapiens
tctcagtgcagcatgttcc

SEQ ID NO: 40104 - DNA, 20 bp, Homo sapiens
gtggtgagatcaagtcggta

SEQ ID NO: 40105 - DNA, 20 bp, Homo sapiens
ccagagtccgaagcactttt

SEQ ID NO: 40106 - DNA, 19 bp, Homo sapiens
gaagacccaaagggaagac

SEQ ID NO: 40107 - DNA, 18 bp, Homo sapiens
ttggctgaggaggtagac

SEQ ID NO: 40108 - DNA, 21 bp, Homo sapiens
tgggttggttattccaactac

SEQ ID NO: 40109 - DNA, 19 bp, Homo sapiens
aaggcacatcggtagagag

SEQ ID NO: 40110 - DNA, 20 bp, Homo sapiens
ttctggaatcagaacctttc

SEQ ID NO: 40111 - DNA, 18 bp, Homo sapiens
gaggctgagctgatgttc

SEQ ID NO: 40112 - DNA, 20 bp, Homo sapiens
ccattgataaactctccttg

SEQ ID NO: 40113 - DNA, 18 bp, Homo sapiens
ttcctctgtgggtctcag

SEQ ID NO: 40114 - DNA, 19 bp, Homo sapiens
gagtgggattcactgagac

SEQ ID NO: 40115 - DNA, 18 bp, Homo sapiens
ggagatgtagcgatgctg

SEQ ID NO: 40116 - DNA, 21 bp, Homo sapiens
ctctcaactcagggaaaagga

SEQ ID NO: 40117 - DNA, 20 bp, Homo sapiens
aagcgcaaccagcttttagt

SEQ ID NO: 40118 - DNA, 17 bp, Homo sapiens
agtcccttcggatttgc

SEQ ID NO: 40119 - DNA, 18 bp, Homo sapiens
attcggaacctgggtcac

SEQ ID NO: 40120 - DNA, 20 bp, Homo sapiens
cttggacaccccgtacattt

SEQ ID NO: 40121 - DNA, 18 bp, Homo sapiens
agcccagcgagtttcctt

SEQ ID NO: 40122 - DNA, 21 bp, Homo sapiens
gataagcaccagcacctttca

SEQ ID NO: 40123 - DNA, 18 bp, Homo sapiens
ccttaatctcctgcttcc

SEQ ID NO: 40124 - DNA, 17 bp, Homo sapiens
ggccagtgagagtatcc

SEQ ID NO: 40125 - DNA, 16 bp, Homo sapiens
tgcatcaggcactcct

SEQ ID NO: 40126 - DNA, 18 bp, Homo sapiens
gtggcaaaatccaattcg

SEQ ID NO: 40127 - DNA, 17 bp, Homo sapiens
tgaccacgtccagcttg

SEQ ID NO: 40128 - DNA, 17 bp, Homo sapiens
tcccacagcttcacacc

SEQ ID NO: 40129 - DNA, 16 bp, Homo sapiens
gcactggtcaaaggtg

SEQ ID NO: 40130 - DNA, 18 bp, Homo sapiens
tctgcgtgtttgtgtacg

SEQ ID NO: 40131 - DNA, 18 bp, Homo sapiens
tcctgcccatagcctctt

SEQ ID NO: 40132 - DNA, 20 bp, Homo sapiens
ttatgagaccctcgtgtttt

SEQ ID NO: 40133 - DNA, 17 bp, Homo sapiens
aattgaaagcagggatc

SEQ ID NO: 40134 - DNA, 20 bp, Homo sapiens
agggtcaaactgcgctacca

SEQ ID NO: 40135 - DNA, 19 bp, Homo sapiens
cttcgtatcctggcgtgct

SEQ ID NO: 40136 - DNA, 19 bp, Homo sapiens
caacgggaacttggtggat

SEQ ID NO: 40137 - DNA, 19 bp, Homo sapiens
cccagtggcagaaggtctt

SEQ ID NO: 40138 - DNA, 20 bp, Homo sapiens
ctcacattgggcgttactgt

SEQ ID NO: 40139 - DNA, 18 bp, Homo sapiens
attccatgcccagagctt

SEQ ID NO: 40140 - DNA, 20 bp, Homo sapiens
tgccaaagatgtcagagatt

SEQ ID NO: 40141 - DNA, 20 bp, Homo sapiens
ccacagtaacgcccaatgtg

SEQ ID NO: 40142 - DNA, 20 bp, Homo sapiens
tatggagccctgtgtattgg

SEQ ID NO: 40143 - DNA, 18 bp, Homo sapiens
tgagttggcaaagggaac

SEQ ID NO: 40144 - DNA, 20 bp, Homo sapiens
ttaaatgatgcctatgatgg

SEQ ID NO: 40145 - DNA, 19 bp, Homo sapiens
ggattggttgacaccgtag

SEQ ID NO: 40146 - DNA, 18 bp, Homo sapiens
gctctgtgtccactttcc

SEQ ID NO: 40147 - DNA, 21 bp, Homo sapiens
cacagtagaacgcaatcaatc

SEQ ID NO: 40148 - DNA, 18 bp, Homo sapiens
tggacaagctgttgaaag

SEQ ID NO: 40149 - DNA, 18 bp, Homo sapiens
gaaaccatgtcgatgctg

SEQ ID NO: 40150 - DNA, 18 bp, Homo sapiens
gggctcttggatggctac

SEQ ID NO: 40151 - DNA, 19 bp, Homo sapiens
gctggtgacgtagatgtcg

SEQ ID NO: 40152 - DNA, 16 bp, Homo sapiens
tcgtgtggagcacatc

SEQ ID NO: 40153 - DNA, 16 bp, Homo sapiens
ccctccatgagatcct

SEQ ID NO: 40154 - DNA, 19 bp, Homo sapiens
tgccaagaaggaacagcta

SEQ ID NO: 40155 - DNA, 20 bp, Homo sapiens
ggtctgtggcttgaacttcc

SEQ ID NO: 40156 - DNA, 19 bp, Homo sapiens
aagcccttccacttccaga

SEQ ID NO: 40157 - DNA, 18 bp, Homo sapiens
ctgaggtcaccattctcc

SEQ ID NO: 40158 - DNA, 18 bp, Homo sapiens
actacggagggaagaagc

SEQ ID NO: 40159 - DNA, 16 bp, Homo sapiens
agtcggcagcaacatc

SEQ ID NO: 40160 - DNA, 20 bp, Homo sapiens
ggaagacctcacgggacttt

SEQ ID NO: 40161 - DNA, 18 bp, Homo sapiens
tgggacagcatgttcttc

SEQ ID NO: 40162 - DNA, 20 bp, Homo sapiens
tacctgaccggggaccagtt

SEQ ID NO: 40163 - DNA, 17 bp, Homo sapiens
cccagcaccttcttgaa

SEQ ID NO: 40164 - DNA, 21 bp, Homo sapiens
tggtatccccactactttgtt

SEQ ID NO: 40165 - DNA, 16 bp, Homo sapiens
agtaagcaggcgctca

SEQ ID NO: 40166 - DNA, 18 bp, Homo sapiens
ttgacagacaacctcgtc

SEQ ID NO: 40167 - DNA, 19 bp, Homo sapiens
acggcaatgcttgatcttg

SEQ ID NO: 40168 - DNA, 16 bp, Homo sapiens
ttgatcgcctccaggt

SEQ ID NO: 40169 - DNA, 17 bp, Homo sapiens
tccgggcatactgcatc

SEQ ID NO: 40170 - DNA, 18 bp, Homo sapiens
tctctcctgctacccaac

SEQ ID NO: 40171 - DNA, 18 bp, Homo sapiens
aaggtcacatgttgcttc

SEQ ID NO: 40172 - DNA, 18 bp, Homo sapiens
aagcaggaatggatctgc

SEQ ID NO: 40173 - DNA, 20 bp, Homo sapiens
aagaacttcgaggggtctgg

SEQ ID NO: 40174 - DNA, 21 bp, Homo sapiens
actgaccacagttgacatcgt

SEQ ID NO: 40175 - DNA, 17 bp, Homo sapiens
acccgcacctgaaactc

SEQ ID NO: 40176 - DNA, 18 bp, Homo sapiens
gacgaatccacatcctga

SEQ ID NO: 40177 - DNA, 18 bp, Homo sapiens
gagaaaatctcccatcca

SEQ ID NO: 40178 - DNA, 17 bp, Homo sapiens
tcagaagggtggtgtga

SEQ ID NO: 40179 - DNA, 16 bp, Homo sapiens
ccattcctccatttcc

SEQ ID NO: 40180 - DNA, 21 bp, Homo sapiens
gagaaggccaatactttggtt

SEQ ID NO: 40181 - DNA, 21 bp, Homo sapiens
tcattgtggaaggagaggttt

SEQ ID NO: 40182 - DNA, 18 bp, Homo sapiens
taagaagcgcaattccac

SEQ ID NO: 40183 - DNA, 20 bp, Homo sapiens
ttatctccatcactgagagg

SEQ ID NO: 40184 - DNA, 20 bp, Homo sapiens
aaagccgcatctgaacttga

SEQ ID NO: 40185 - DNA, 17 bp, Homo sapiens
ggctgttaccgacacgt

SEQ ID NO: 40186 - DNA, 17 bp, Homo sapiens
ccaccgcctgcttgttt

SEQ ID NO: 40187 - DNA, 18 bp, Homo sapiens
ccgatatttgcctctcta

SEQ ID NO: 40188 - DNA, 20 bp, Homo sapiens
ccactccctccaagatgttt

SEQ ID NO: 40189 - DNA, 19 bp, Homo sapiens
caggagcagccaaccactt
